United States Patent Application Publication US 2024/0075116 A1 - sequence listing, part 3

SEQ ID NO: 4493 - RNA, 2931 nt, synthetic construct
  misc_feature 1..2931: note = EAW56623 variant
  source 1..2931: mol_type = other RNA
atggaaaaacaaaaaccattcgccctcttcgtaccaccccgctcaagcagctcacaagtaagcgccgtgaaaccccaaacactgggaggcgactccaccttcttcaaatcattcaacaaatgcaccgaagacgacttcgagttcccattcgcaaaaacgaacctttcgaaaaacggggaaaacatcgactccgacccggcactccaaaaagtcaacttcctgcccgtactcgaacaagtcggaaacagcgactgccactaccaggagggcctgaaagactcagacctcgagaacagcgagggactaagccgcgtgtacagcaaactgtacaaagaagccgagaaaattaagaaatggaaagtaagcacggaagcagagctacggcaaaaagaaagcaaactacaggaaaaccggaaaatcatcgaagcccagcgcaaggccatccaggaactacaattcggaaacgaaaaggtttcgctgaaactagaagagggaatacaagaaaacaaggacctaatcaaggaaaacaacgcaactcgccacctgtgcaacctcctcaaggaaacctgcgcccggagtgctgagaaaaccaagaaatacgaatacgaacgcgaggagacgcggcaggtctacatggacctcaacaataacatcgagaaaatgatcaccgcattcgaagaattacgcgtccaagcagaaaactcacgactagaaatgcacttcaaactaaaagaagactacgagaaaatccagcacctcgaacaggaatacaaaaaggaaatcaacgacaaagaaaaacaggtcagcctcctgttaatacaaattacagaaaaagaaaacaaaatgaaagatctaactttcctcctcgaagagagcagagacaaagtaaatcaattagaggagaaaacaaaactgcaatccgaaaacttaaaacaatcaatcgaaaaacagcaccaccttacaaaagaactcgaagacataaaagtaagcctccagagatccgtatccacccagaaggccctagaagaagaccttcagatagccaccaagacaatctgccaactcacagaagaaaaagaaacccagatggaagaatcgaacaaagcccgcgccgcacacagctttgtagtcaccgagttcgaaacgacggtgtgcagcctcgaagaactcctacgcaccgaacaacaaagactagaaaagaacgaggatcaactaaaaatactgaccatggaactacagaaaaagtcgagcgaactcgaagaaatgaccaagctaacaaacaacaaggaagtagaattggaggaactcaaaaaggtcctaggcgaaaaagaaaccctactatacgaaaacaagcaattcgagaaaatcgccgaagaactaaaaggaaccgaacaagaacttataggcctccttcaagcacgagaaaaagaagtgcacgacctcgaaatccaactaacagcaatcacaaccagcgagcaatactacagcaaggaagtgaaggacttaaaaaccgaacttgaaaacgaaaaactcaaaaacaccgaactcacatcccattgcaacaaactcagcctggagaacaaggagctaacacaagagacgagcgacatgaccctcgaactcaagaaccaacaggaagacattaacaacaacaagaagcaagaggagcgcatgctcaagcaaatcgagaacctccaagaaacagaaacccagcttagaaacgagctcgaatacgtacgcgaagaactaaaacaaaaacgcgacgaagtcaaatgcaaactagacaaatccgaagaaaactgcaacaacctcagaaaacaagtcgaaaataaaaacaaatacatcgaggagctccaacaagaaaacaaggcgttaaagaagaaagggaccgcggaaagcaaacaactcaacgtgtacgagataaaagtcaacaaactggaactggaactggagtccgcaaaacagaaattcggagagatcaccgacacctaccagaaagagatagaagacaaaaagatatccgaagagaacctcctcgaagaagttgagaaagccaaggtcatcgctgacgaggccgtcaaactacaaaaagagatcgacaaacgatgccaacataaaatagccgaaatggtcgcactcatggagaagcacaaacaccaatacgacaagatcatagaagaacgcgacagcgaactcggcctgtacaaatccaaagaacaagaacaatccagcctgcgcgccagcctggaaatcgaactatccaacctcaaggccgaactcctcagcgtcaaaaagcaactcgaaatagaacgagaggaaaaggaaaaactcaagagggaagccaaagaaaacacggccaccctaaaagagaagaaggacaaaaagacacagaccttcctgctagagacacccgaaatatactggaaactcgattcaaaggccgtaccctcccaaacagtctcaagaaacttcacatcagtcgaccacggcatcagcaaagacaaacgcgactacctctggacaagcgccaaaaacacgcttagcacacccctcccaaaagcctacaccgtcaaaaccccaaccaaacccaaactccaacaaagagaaaacctaaacataccaatagaggaatccaaaaagaaacgaaaaatggcattcgagttcgacatcaacagcgacagctcagaaacaaccgacctcctaagcatggtctccgaagaagaaacgctgaaaacactataccgcaacaacaacccacccgcaagccacttatgcgtaaaaacacccaagaaagcacccagcagcctaacgacccccggcagcacacttaaattcggcgccatccgcaaaatgcgcgaggacagatgggccgtcatcgcaaagatggatcgcaagaagaaactcaaagaagcggagaaactcttcgtctag

SEQ ID NO: 4494 - RNA, 2931 nt, synthetic construct
  misc_feature 1..2931: note = AAI44020 variant
  source 1..2931: mol_type = other RNA
atggagaaacagaaaccctttgccctgttcgtcccgccacgaagcagctccagccaggtatcagccgtgaaaccgcaaacactaggaggggacagcacgttcttcaagagcttcaacaaatgcacagaagacgacttcgagttcccgttcgccaaaacaaacctcagcaaaaacggggaaaatatcgacagcgacccagcactgcagaaggtgaacttcttaccagtcttcgaacaggtcgggaacagcgactgtcattaccaagaggggctcaaagacagtgacctagagaacagcgaaggcctttcgcgcgtgtatagtaagctgtacaaagaagcggaaaagataaagaagtggaaggtcagcaccgaagcagaactacgccagaaggagagcaagctgcaagaaaaccgcaagatcatcgaagcccagcgcaaagccatacaagaactacaattcggcaacgagaaagtctctctcaaactcgaagagggaatacaagaaaacaaagacctcataaaggagaacaacgccacgcgccacctctgcaacctgctcaaagaaacatgcgcgaggagcgccgagaagaccaagaaatacgaatacgagagagaagagaccagacaagtttacatggacctcaacagcaacatagagaaaatgatcacagccttcgaagaactcagagtacaggcagagaactcgcgcctagaaatgcactttaaactgaaagaggactacgaaaagatacaacacctcgaacaggaatacaagaaggagataaacgacaaagagaagcaagtatcactcctcctgatacaaatcacagaaaaagagaacaaaatgaaggacttaacgttcctacttgaagaaagcagagacaaggtcaaccaactagaggagaaaacaaaacttcaatcagaaaaccttaaacaatcaatcgagaaacaacaccacctcaccaaggagctcgaagacataaaagtaagcctccaaagaagcgtaagcacgcaaaaagcattagaggaagacctccaaatagccacaaagacgatatgccaactcaccgaagaaaaagaaacgcaaatggaggaaagcaacaaagcaagagccgcccacagcttcgtcgtaacggagttcgagactacagtctgcagcctagaggagctgctaaggaccgaacaacaacgactcgagaagaacgaagatcaactaaaaatactgacaatggaactccaaaagaaaagctcggagctcgaagaaatgaccaaactgacaaataacaaagaggtagaattagaggaactaaagaaggtactaggcgaaaaagagaccctcctgtacgaaaacaagcaattcgagaaaatagcggaagaactgaaaggaacagaacaggaactcatcggactgctacaagcgcgcgaaaaggaagtacacgacctagaaatccagctgaccgccatcacaacatcggaacagtactatagcaaagaagtgaaagacctaaaaacagagctcgaaaacgagaaactcaaaaacaccgaactaacctcccactgcaacaagctatcactagagaataaggagctcactcaagagaccagtgatatgaccctggaactcaaaaaccaacaagaagatataaacaataacaaaaagcaagaggaacgcatgctcaaacagatagagaacctgcaagagacggaaacccaactccgaaacgaattagaatacgtccgggaggagctgaaacaaaaacgagacgaagtgaagtgtaaactggacaagagcgaggaaaactgcaacaacctacgcaaacaggtggagaacaagaacaagtacatcgaagaactccaacaagagaacaaagcactaaagaagaaagggacagcggaatcaaaacaactaaacgtctacgaaataaaagtgaacaaactggaactagaactggagagcgcaaaacaaaaattcggcgaaataacagacacataccaaaaagaaatagaggacaagaaaataagcgaggaaaacctcctagaggaagtcgagaaagcaaaagtaatcgcggatgaagcggtcaaactgcaaaaagaaatcgacaaacgctgccaacacaaaatagccgaaatggtagcgctcatggaaaaacacaaacaccaatacgacaaaatcatagaagaacgcgacagcgaactagggctatacaaatccaaagagcaagaacagagcagcctacgcgcatcactcgaaatagaactatcaaacctcaaagcagaattgctcagtgtgaagaaacagctcgaaatagagcgagaggaaaaagaaaaactcaaacgcgaagcaaaggaaaacacagcaacactcaaggaaaagaaagacaagaaaacccaaaccttcctcctagaaacgccagagatttactggaaactcgactccaaagcagtcccatcgcaaaccgtcagccgaaacttcacaagcgtagaccacgggataagcaaagacaaacgcgactacctgtggacgtcagccaaaaacacactcagcaccccactcccaaaagcatacaccgtaaaaacacccacgaaaccaaaactccaacagcgtgaaaacctgaacatacccatagaggagagcaagaagaaaagaaaaatggcgtttgagttcgacataaacagcgacagctcggaaacgaccgacctcctaagcatggtttcagaggaagaaaccctcaaaactctgtaccgcaacaacaacccaccagcttcccatctgtgcgtaaaaaccccgaaaaaggcaccgagctcactgacaaccccaggctcaaccctcaaatttggagccatcagaaagatgcgagaggaccgatgggcagtgatagccaagatggaccgcaaaaagaaactgaaagaggcagagaaactattcgtataa

SEQ ID NO: 4495 - RNA, 2931 nt, synthetic construct
  misc_feature 1..2931: note = AAI26267 variant
  source 1..2931: mol_type = other RNA
atggaaaagcaaaaaccattcgccttattcgtaccaccccgctcgagctcaagccaagtatccgccgtaaaaccccaaacactagggggcgactcaaccttcttcaaatcgttcaacaaatgcaccgaagacgacttcgagttccccttcgccaaaacgaatctctccaagaacggagaaaacatcgactcggaccccgcactacagaaagtcaacttcctaccagtacttgagcaggtcgggaacagcgactgccactaccaagaaggacttaaagacagcgacctagaaaactcggaaggactcagccgcgtatacagcaagctatacaaggaagcagagaaaatcaaaaagtggaaagtaagcacggaagcagaactgcgccaaaaagaaagcaagctacaggaaaacagaaaaataatagaagcgcagaggaaagcgatccaagagctacaattcggcaacgagaaagtatccctcaaactcgaagaagggatccaagaaaacaaagacttaataaaagaaaacaatgcgacgcggcacctatgcaacctcctaaaagaaacatgcgcccgcagcgcagagaaaaccaagaaatacgaatacgaacgcgaggagacgcgacaagtatatatggacctgaacaacaatatcgagaaaatgataacagccttcgaggaactcagggtccaggccgaaaacagccgcctcgaaatgcacttcaaactaaaggaagactacgagaaaatccagcacttggaacaagaatacaagaaagaaatcaacgacaaagaaaaacaagtgagcctcctactgatacagatcaccgaaaaagaaaacaagatgaaggacctcacgttcctcctagaagaaagcagggacaaagtcaaccaacttgaagagaaaaccaagctacaatcagaaaacctcaagcagagtatagaaaagcagcaccatctgacgaaagaactcgaagacatcaaggtaagcctgcagaggtcggtaagtacacaaaaagcattggaagaagacctccaaatcgcaaccaaaacgatctgccaactcacagaggaaaaagaaacacaaatggaagaaagcaacaaggcacgagccgcccatagtttcgtggtcaccgagttcgaaactacagtctgcagcctcgaagaactgctaaggacagaacagcagagactagaaaagaacgaagaccaactcaagatccttacaatggagctacagaagaaaagcagcgagctagaagaaatgaccaaactcacaaataacaaagaggtggaactcgaagaactaaagaaagtactaggtgaaaaagagaccctcctatacgaaaacaaacagttcgagaaaatcgccgaagaactcaaaggaaccgagcaagaactaatcggcttactacaggcaagagagaaggaagtacacgatctggaaatccagctgacagccatcaccacctcagagcaatactacagcaaagaagtcaaagacctaaaaaccgagctggagaacgaaaagctcaagaacacagaactcacgtcacactgcaacaaactgagcctggaaaacaaagagctgacacaggaaacgtcagacatgacactagaactcaaaaatcaacaagaggacataaacaacaacaagaaacaagaggagagaatgctgaaacagatcgaaaacctccaagagaccgagacacagttgcgaaacgaactagaatacgtgcgagaagaactgaaacagaaaagagacgaagtcaaatgcaaactggacaaatcagaggaaaattgcaacaacctacgcaaacaagtagagaataaaaacaagtacatagaagaactacaacaagagaacaaggcactgaaaaagaaagggaccgcggaatcaaaacaattaaacgtatacgaaataaaggtaaataaactcgagctggaactagaatccgccaaacagaagttcggagaaataacagacacgtaccagaaagagatcgaagacaagaaaataagcgaagaaaatctcctggaagaggtagagaaggccaaagtcatagcggatgaagccgtaaaattacaaaaagaaatagacaaacgatgccaacacaaaatcgctgaaatggtagccctaatggagaagcacaaacaccaatacgacaaaatcatcgaggaacgagacagcgagctgggcctatacaaatccaaagaacaagaacaatcgtcgctgcgcgccagcttagaaatagaactgagcaacctcaaggccgaactgctaagcgtgaaaaagcagctagaaatagaaagagaggaaaaagaaaaactcaagagggaagccaaggagaacaccgcaacactgaaagaaaagaaagacaagaaaacgcaaacattcctcctagaaacaccagagatctactggaaactcgacagcaaagcggtaccaagtcaaaccgtatcacgaaacttcacgagcgtagaccacggcataagcaaagacaaacgcgactacctctggacgagcgccaaaaatacactcagtacgcccctgccaaaagcatacacggtcaaaacgcccacgaaaccgaaactacaacagcgagaaaacctgaacataccaattgaagagagcaagaagaaaagaaagatggcgttcgagttcgatataaactcggacagcagtgaaaccacggatctcctcagcatggtcagcgaggaggaaaccctcaaaaccctctacaggaacaacaatccacccgcctcgcacctgtgcgtcaaaacccccaaaaaggcaccctcatccctcaccacccccggcagcaccctgaagttcggcgcgatacggaaaatgcgagaagaccgatgggcagtcatagccaaaatggaccggaaaaagaaactcaaagaggctgaaaaactattcgtctaa

SEQ ID NO: 4496 - RNA, 330 nt, synthetic construct
  misc_feature 1..330: note = AAI05300 variant
  source 1..330: mol_type = other RNA
atggaaaaacaaaaacccttcgccctcttcgtccccccccgctcctcctcctcccaagtctccgccgtcaaaccccaaaccctcggcggcgactccaccttcttcaaatccttcaacaaatgcaccgaagacgacttcgaattccccttcgccaaaaccaacctctccaaaaacggcgaaaacatcgactccgaccccgccctccaaaacgtcaacttcctccccgtcctcgaacaagtcggcaactccgactgccactaccaagaaggcctcaaagactccgacctcgaaaactccgaaggcctctcccgcgtctactccaaactctaa

SEQ ID NO: 4497 - RNA, 1467 nt, synthetic construct
  misc_feature 1..1467: note = BAF56181 variant
  source 1..1467: mol_type = other RNA
atgtccgtcgccttcgccgcccctcgacaacgcggaaaaggagaaataacccccgccgccatccagaaaatgctagacgacaacaaccacctaattcaatgcatcatggactcccaaaacaaaggcaaaacatctgaatgctcccaataccaacaaatgctccacaccaacctcgtatacctcgccaccatagctgattcaaaccaaaatatgcaaagcctcctaccagcacccccaacacaaaacatgccaatgggcccaggcggcatgaaccaaagcggacccccaccacccccaagatcccacaacatgccatcagacggcatggtcggtggtggacccccagctccccacatgcaaaaccaaatgaacggccaaatgcccggtccaaaccacatgcccatgcaaggccccgggcccaatcaactcaacatgacaaactcatcaatgaacatgccctcatcctcccacggcagcatgggcggctacaaccactcagtcccatcatcccaatcaatgcccgttcaaaaccaaatgaccatgtcccaaggccaacccatgggaaactacggcccccgacccaacatgagcatgcaacccaaccaaggtccaatgatgcaccagcaaccaccctcgcaacaatacaacatgccccaaggaggaggccaacactaccaaggccaacaacccccaatgggaatgatgggccaggtaaaccaaggcaaccacatgatgggacagcgtcaaatcccaccctacagacccccacaacaaggccctccccaacaatactcaggccaagaagactactacggcgaccaatattcacacggaggccaaggcccacccgaaggcatgaaccaacaatactaccccgacggacacaacgactacggctaccaacaaccaagctaccccgagcaaggttacgaccgcccgtacgaagactcgtcccaacactactacgaaggcggcaactcccaatacggccaacaacaagacgcctaccaaggacccccaccacaacaaggctacccgccccaacaacaacaatatcccggccaacaaggctaccctggccaacaacaaggctacggcccttcacaaggcggccccggcccccaatacccaaactatccccaaggccaaggacagcaatacggcggttaccgcccaacccaaccaggaccaccccaaccgccccaacaacgcccctacggatacgaccagatcatgcccaagaaacccgcagaagacgaaaacgacagcaaaggcgtctccgaagcatcaggaccccaaaacgacggaaaacaactccaccctcccggcaaagccaacatctcagagaaaatcaacaaacgctctggccccaagcgcggcaaacacgcctggacccacagactcagggaacgaaaacaactcgtcatctacgaagaaatctccgaccccgaagaagacgacgaataa

SEQ ID NO: 4498 - RNA, 1374 nt, synthetic construct
  misc_feature 1..1374: note = BAF56182 variant
  source 1..1374: mol_type = other RNA
atgtcagtagccttcgccgcccccagacaacgaggaaaaggcgaaataaccccagcagccatccaaaaaatgctagacgacaataaccacctcatccaatgcataatggacagccaaaacaaaggaaaaacctccgaatgctcccagtaccaacaaatgctccatacaaacctcgtctacctggccactatcgcagactcaaaccaaaacatgcaaagcctccttcccgcccccccaactcaaaacatgccaatgggcccaggcggcatgaaccaatcaggcccccctccacccccccgctcccataacatgccaagcgacggcatggtcggaggcggcccacccgcaccccacatgcaaaatcaaatgaacggccaaatgcccggccccaaccacatgccaatgcaaggccccggtcccaaccaactcaacatgaccaactcctccatgaacatgcccagctcctcccacggatcaatgggcggctacaaccactcagtcccctcatcccaatccatgccagtccaaaaccaaatgaccatgagccagggccaacccatgggcaactacggcccccgaccaaacatgtcaatgcaacccaaccaaggccccatgatgcaccaacaacccccaagccaacaatacaacatgcctcaaggaggcggacaacactaccaaggccaacaaccccccatgggcatgatgggacaagtcaaccaaggcaaccacatgatgggacaacgccaaatacccccctacaggcccccccaacaaggccccccacaacaatactcaggccaagaagactactacggagaccaatattcacacggcggccaaggcccccccgaaggaatgaaccagcaatactaccccgacggcaactcacaatacggacaacaacaggacgcctaccaaggtcccccaccccaacaaggataccccccacaacaacagcaataccccggccaacaaggatacccaggacaacaacaaggctacggcccctcccaaggaggacccggcccccaataccccaactacccccaaggccaaggacaacagtacggtggataccgccccacacaacccggccccccccaacccccccaacagcgaccctacggctacgaccaaatcatgcccaaaaaacccgcagaagacgaaaacgactccaaaggagtctcagaagcctcaggcccccaaaacgacggaaagcaactccacccccccggcaaagcaaacatctccgaaaaaatcaacaaacgttccggacccaaacgaggaaaacacgcctggacccaccgactccgcgaacgcaaacagctcgtaatatacgaagaaatatccgaccccgaagaagacgacgaataa

SEQ ID NO: 4499 - RNA, 1467 nt, synthetic construct
  misc_feature 1..1467: note = BAF56183 variant
  source 1..1467: mol_type = other RNA
atgagcgtcgccttcgccgcccctcgacaacgcggcaaaggcgaaataacccccgcagccatccaaaaaatgctggacgacaacaaccacctaatacaatgcatcatggattcacaaaacaaaggcaaaacctcagaatgctcccaataccaacaaatgctacacactaatcttgtctacctcgcaaccatcgccgactcaaaccaaaacatgcagtccctactacccgccccccccactcaaaacatgccaatgggacccggcggaatgaaccaatcaggaccacccccaccccctcgctcccacaatatgccatccgacggaatggtcggcggcggcccccctgcaccccacatgcaaaaccaaatgaacggccaaatgccaggacccaaccacatgcctatgcaaggacccggccccaaccaactaaacatgacgaactcatccatgaacatgccctcctcctcccacggctccatgggcggctacaaccactccgtcccctcctcccaatcaatgcccgtacaaaaccaaatgacaatgagccaaggccagccaatgggcaattacggaccccgccccaacatgtcaatgcaacccaaccaaggccccatgatgcaccaacaaccccccagtcaacaatacaacatgcctcaaggcggaggccagcactaccaaggccaacaaccccccatgggaatgatgggccaagtcaaccaaggaaaccacatgatgggtcaacgacaaatccccccctaccgcccaccccaacaaggcccaccccaacaatactccggccaagaagactactacggcgaccaatacagccatggcggccaaggaccacccgaaggcatgaaccagcagtactacccagacggccacaacgactatgggtaccagcaaccctcctaccccgaacaaggctacgaccgcccatacgaagactcctcccaacactactacgaaggcggtaattcccaatacggacaacaacaagacgcataccagggtccccccccacaacagggatacccaccccaacaacaacaataccccggccaacaaggctacccaggccaacaacaaggttacggcccctcccaaggcggccccggaccccaataccccaactacccccaaggacaaggacaacaatacggcggatatcgccccacccaaccaggacccccacaacccccccaacaacgcccctacggttacgaccaaatcatgcctaaaaaaccagccgaagaaggcaacgactcggaagaagtacccgaagcttccggaccccaaaacgacggcaaagaactgtgtcccccaggcaaacccaccacctcagaaaaaattcacgagcgctcaggccccaaacgaggcgaacacgcatggacccaccgcctccgcgaaagaaaacaactcgtcatctacgaagaaatatcagaccccgaagaagacgacgagtaa

SEQ ID NO: 4500 - RNA, 1374 nt, synthetic construct
  misc_feature 1..1374: note = BAF56184 variant
  source 1..1374: mol_type = other RNA
atgtcagtcgcctttgccgccccccgccagagaggaaaaggggaaatcacacctgcagccatacaaaaaatgctcgacgacaataaccacctcatccaatgcatcatggactcccaaaacaaaggcaagacctccgaatgctcacaataccaacaaatgctccacaccaacctcgtctacctcgccacaatagccgacagcaatcaaaacatgcaatccctcctccccgctccccccacgcaaaacatgccaatgggcccaggaggtatgaaccaatccggacccccaccccccccacgatcccacaacatgccctcagatggcatggtcggcggcggcccacccgcaccccatatgcaaaaccaaatgaacggccaaatgccaggccccaaccacatgcccatgcaaggccccggaccaaaccaactaaacatgaccaactcctccatgaacatgccctcatcctcccacggaagcatgggaggctacaaccacagcgtccccagcagccaatccatgcctgtacaaaaccaaatgaccatgtcccaaggccaaccaatgggaaactacggcccccgacccaacatgtccatgcaacccaaccaaggcccaatgatgcaccaacaaccaccaagccaacaatacaacatgccacaaggcggaggacaacattaccaaggccaacaaccacccatgggaatgatgggccaagtcaaccaaggcaaccacatgatgggccaacgccaaattcccccatatcgcccaccccaacaaggccccccccagcagtacagcggacaagaagactactacggcgaccaatactcacacggcggtcaaggcccccccgaaggtatgaaccaacaatactaccccgacggaaactcccaatacggccaacaacaagacgcgtaccagggcccaccaccccaacaaggctaccccccccaacaacaacaataccccggacaacaaggctaccccggacaacaacaaggctacggcccctcccaaggcggccccggcccccagtaccccaattacccccaaggtcaaggtcaacaatacggaggctaccgccccacccaacccggccccccccaacccccccaacaacgcccctacggctacgaccaaataatgcctaaaaaacccgcagaagaaggcaacgactcagaagaagtcccagaagcaagcggtccccaaaacgacggcaaagaactctgcccccccggcaaacccaccacatccgaaaaaatccacgaacgcagcggacccaaacgcggcgaacacgcctggacccaccgacttagagaaagaaaacaacttgtcatctacgaagaaatatcagacccagaagaagacgatgaataa

SEQ ID NO: 4501 - RNA, 336 nt, synthetic construct
  misc_feature 1..336: note = AAI05590 variant
  source 1..336: mol_type = other RNA
atgaaaaccaacgacacctacatgaaattctcctggctcaccgtccccgaaaaatccctcgacaaagaacaccgctgcatcgtccgccacgaaaacaacaaaaacggcgtcgaccaagaaatcatcttcccccccatcaaaaccgacgtcatcaccatggaccccaaagacaactgctccaaagacgccaacgacaccctcctcctccaactcaccaacacctccgcctactacatgtacctcctcctcctcctcaaatccgtcgtctacttcgccatcatcacctgctgcctcctccgccgcaccgccttctgctgcaacggcgaaaaatcctaa

SEQ ID NO: 4502 - RNA, 177 nt, synthetic construct
  misc_feature 1..177: note = AAG29337 variant
  source 1..177: mol_type = other RNA
atgcaaatgttccccccctcccccctcttcttcttcctccaactcctcaaacaatcctcccgccgcctcgaacacaccttcgtcttcctccgcaacttctccctcatgctcctccgctacatcggcaaaaaacgccgcgccacccgcttctgggacccccgccgcggcaccccctaa

SEQ ID NO: 4503 - RNA, 1131 nt, synthetic construct
  misc_feature 1..1131: note = AAF26776 variant
  source 1..1131: mol_type = other RNA
atggccaattccgcaaacaccaacaccgtacccaaactctatcgctcagtcatagaagacgtaatcaacgacgtccgagacatcttcctagacgacggcgtcgacgaacaagtcctaatggaactcaaaacactctgggaaaacaaactaatgcaatcacgagcagtcgacggattccactccgaagaacaacaactactccttcaagtccaacaacaacaccaaccccaacaacaacaacaccaccaccaccaccaccaccaacaagcccaaccccaacaaaccgtcccccaacaagcccaaacacaacaagtcctcatcccagcctcacaacaagccaccgcaccccaagtcatagtccccgactccaaactaatacaacacatgaacgcctcaaacatgtcagccgcagccaccgccgcaaccctcgccctcccagccggcgtaacccccgtacaacaaatcctcaccaactccggccaactcctacaagttgtccgcgccgccaacggcgcacaatacatcttccaaccccaacaatccgtcgtcctccaacaacaagtaatcccccaaatgcaacccggcggcgtacaagccccagtcatacaacaagtactagccccactcccaggcggaatatcaccacaaaccggagtcataatccaaccccaacaaatcctcttcaccggaaacaaaacccaagtcatacccaccaccgtcgcagcaccaacccccgcccaagcacaaataaccgccactggccaacaacaaccccaagcccaaccagcccaaacacaagcccctctagtcctccaagtcgacggcacaggcgacacctcatccgaagaagacgaagacgaagaggaagactatgacgacgacgaagaagaagacaaagaaaaagacggagccgaagacggccaggtcgaagaagaacccctcaactctgaagacgacgtatccgacgaagaaggccaagaactcttcgacacagaaaacgtcgtcgtatgccaatacgacaaaatccatcgctccaaaaacaaatggaaattccacctcaaagacggcatcatgaacctaaacggacgcgactacatattctccaaagcaataggcgacgccgaatggtaa

SEQ ID NO: 4504 - RNA, 1173 nt, synthetic construct
  misc_feature 1..1173: note = AAH00125 variant
  source 1..1173: mol_type = other RNA
atgccaccctccggcctccgcctcctactcctcctcctccccctcctctggctactcgtactcacccccggccgccccgccgccggcctctcaacctgcaaaaccatcgatatggaactcgtcaaacgcaaacgaatagaagccatccgcggccaaatcctatcaaaactccgcctagcctccccaccctcccaaggagaagtcccacccggccccctccccgaagccgtcctagcactgtacaactccacccgcgaccgcgtcgccggcgaaagcgccgaacccgaacccgaacccgaagccgactactacgccaaagaagtcacccgcgtactcatggtagaaacccacaacgaaatatacgacaaattcaaacaatccacccactccatctacatgttcttcaacacgtccgaactccgagaagccgtccccgaacccgtcctcctctcacgcgcagaactccgactactccgtctcaaactgaaggtcgaacaacacgtagaactctaccaaaaatactccaacaactcatggcgctacctctccaaccgcctactcgcaccatcagacagccccgaatggctctcattcgacgtaactggagtagtccgccaatggctttcccgaggaggtgaaatcgaaggattccgtctcagcgcccactgctcctgcgactcccgagataacaccctacaagtggacataaacggcttcaccaccggccgccgtggagacctcgctaccatacacggcatgaaccgacctttcctactcctgatggccacacccctagaacgcgcccaacacctacaatccagccgccaccgccgcgccttagacaccaactactgcttctcctcaaccgagaaaaattgctgcgtccgccaactatacatcgacttccgcaaagacctaggatggaaatggatccacgaacccaaaggctaccacgccaacttctgcctaggaccatgcccctacatctggtcactagatacccaatactccaaagtcctcgcactatacaaccagcacaacccaggcgcatccgccgccccctgctgcgtacctcaagccctcgaaccgctcccaatagtatactacgtaggtcgcaaaccaaaagtcgaacaactctccaacatgatcgtccgctcctgcaaatgctcctga

SEQ ID NO: 4505 - RNA, 1704 nt, synthetic construct
  misc_feature 1..1704: note = AAT70724 variant
  source 1..1704: mol_type = other RNA
atgggccgcggcctcctccgcggactatggccacttcacatcgtcctctggacccgaatcgcgtccacaatacccccacacgtccagaaaagcgtcaacaacgacatgatcgtcacagacaataatggcgcagtaaagttcccccaactctgcaaattctgcgacgtgcgattctcgacctgcgacaaccaaaaatcctgcatgtccaactgttcgataactagcatctgcgaaaaaccccaagaagtctgcgtagccgtatggcgcaaaaacgacgaaaacatcacactcgaaactgtctgccacgacccaaaactcccataccacgacttcatcctggaagacgcagcatctcccaaatgcatcatgaaagagaaaaagaaacccggcgagaccttcttcatgtgctcatgctcctccgacgaatgcaacgacaacatcatcttttcagaagaatacaacacctccaacccagacctactactcgtcatatttcaggtcacaggcatatctctactcccaccactgggagtagccatctcagttataatcatcttctactgctaccgtgtaaaccgccaacaaaaactatcctccacatgggaaaccggcaaaacccgcaaactaatggagttctcagaacactgcgccataatccttgaagacgaccgatcagacatatccagcacatgcgccaacaatatcaaccacaacaccgaactactccccatagaactcgacaccctcgtcggaaaaggtcgcttcgccgaagtctacaaagccaaactcaaacaaaacacctccgaacaattcgaaacagtagccgtaaaaatcttcccttacgaagaatacgcatcctggaaaaccgaaaaagacatattctccgacatcaacctaaaacacgaaaacatactccaattcctcaccgccgaagaacgtaaaacggaacttggcaaacaatattggctcatcaccgcgtttcacgctaaaggcaacctccaagaatacctcacacgccacgtcatctcgtgggaagatctaagaaagctcgggagttccctcgcacgaggcatcgctcacctccactcggaccacaccccctgcggccgtcccaaaatgccaatagtccaccgagacctaaaatcgtccaacatactcgtcaaaaacgacctgacctgctgcctctgcgacttcggcctctctctccgtctcgacccaaccttatcagtcgacgacctcgccaactccggacaagtaggcacggcacgatacatggcaccagaagtcctcgaatcacgcatgaacttagaaaatgtcgaatcattcaagcagaccgacgtctactccatggcactcgtactctgggaaatgacctcccgctgcaacgccgtcggagaagtcaaagactacgaaccccctttcggatcaaaagtacgagaacacccctgcgtcgaatcaatgaaagacaacgtactcagggaccggggtcgcccagaaatcccctccttttggctcaaccaccaaggcatccaaatggtctgcgaaaccctcaccgaatgctgggaccacgaccccgaggcccgcctcaccgcccaatgcgtcgccgaacgcttttcggaactcgaacacctagaccgactaagcggcagatcatgctccgaagagaaaatcccagaagacggctccctcaacacgacaaaatag

SEQ ID NO: 4506 - RNA, 2055 nt, synthetic construct
  misc_feature 1..2055: note = BAG35778 variant
  source 1..2055: mol_type = other RNA
atgatggacgcatccaaagaactgcaagtcctccacatagacttcctcaaccaagacaacgccgtctcacaccacacatgggagttccaaaccagtagcccagtcttccgtcgcggtcaagtcttccacttacgcctcgtcctcaaccaacccccacaatcataccatcaacttaaactcgaattttcaacaggcccaaaccccagcatcgcaaaacacaccctagtagtactcgacccgagaacacccagcgaccattataactggcaagcaacactgcaaaacgaaagcggcaaagaagtcaccgttgcagtcacctcttcccccaacgcaatcctcggcaagtaccaattaaacgtcaaaaccggcaaccacatactcaagtcagaagaaaacatcctctacctcctcttcaacccatggtgcaaagaagacatggtcttcatgcccgacgaagacgaacgaaaagaatacatactcaacgacaccggctgccattacgtaggcgccgcccgttcaatcaaatgcaagccctggaacttcgggcaatttgagaaaaatgtactcgactgctgcatcagtctcctcaccgaatccagcctcaaacccaccgaccgcagagaccccgtcctcgtatgcagagccatgtgcgccatgatgagcttcgaaaaaggacaaggcgtcctcataggcaactggacaggcgactatgaaggcggcacagcaccatacaagtggactggctcagccccaatcctacagcagtactacaacaccaagcaagcagtctgcttcggacaatgctgggtattcgccggaatcctgaccaccgtcctacgcgcactgggcatcccagcgcgctcagtaacaggcttcgactccgcccacgacacggaacgcaacttaactgtagatacgtacgtaaacgagaacggagagaaaataacctccatgacacatgacagcgtctggaacttccacgtctggaccgacgcctggatgaaacgacccgacctacccaagggatacgacggctggcaagccgtcgacgccacaccacaagaacggagccaaggcgtcttctgctgcggaccaagccccctaaccgccatacgaaaaggggacatcttcatagtctacgacacaagattcgtcttctctgaagtcaacggcgaccgcctcatctggctcgtaaaaatggtcaacggccaagaagaactccacgtcatttccatggaaacaacctccatcggcaaaaacatctccacaaaggccgtcggacaggaccgccgccgagacatcacctacgaatacaaataccccgaaggaagctccgaagaaagacaggtcatggaccacgccttcctgctactctcatcagaacgagagcaccgccgcccagttaaagagaacttcctccacatgagcgtccaatccgacgacgtcctgctgggcaactcagtcaacttcacagtaatcctcaaaagaaaaacagccgcccttcaaaacgttaatatactcggcagcttcgagctccaactatacaccggaaagaaaatggccaaactatgcgacctcaacaaaactagccaaatccaaggccaagtctccgaagtcactcttaccctagactccaaaacctacatcaactccctcgccatcctagacgacgaacccgtcatacgcggatttataatagctgagatcgtagaaagcaaagaaatcatggctagtgaagtcttcacctccttccaataccccgagttctccatcgaactccccaatacaggtagaatcggtcaactcctagtctgcaactgtatcttcaaaaacaccctagccatacccctcacagacgtcaaattcagcctcgaaagcctcggcatctcatccctccaaacctccgaccacggcacagtccaaccgggcgaaaccatccagtcccaaatcaagtgcacacccatcaaaaccggacccaagaaattcatcgtcaaactctccagcaaacaagtcaaggaaatcaacgcccagaaaatcgtactcatcacaaaataa

SEQ ID NO: 4507 - RNA, 3375 nt, synthetic construct
  misc_feature 1..3375: note = CCDS6519.1 variant
  source 1..3375: mol_type = other RNA
atggacagcctcgcatcactggtgctttgcggcgtaagcctcctcctctcaggcacagtcgagggcgccatggacctcatactaatcaacagtctccccctcgtatcagatgccgagacgtcactcacctgtatagcctcaggctggcgaccacacgagcctataaccataggaagagatttcgaggccctaatgaaccaacaccaggaccctcttgaagttacccaagacgtgacgcgagaatgggcgaaaaaggtcgtctggaaacgagaaaaagcatccaaaataaatggcgcctacttctgcgagggacgggttaggggcgaagccatccgcatacgcacgatgaaaatgcgccaacaagcctccttcctcccagcaacgctcaccatgaccgtcgacaagggagacaacgtcaacatctcattcaagaaagtactgatcaaagaagaggatgccgtgatctataaaaacggcagtttcatccacagcgtcccacgccacgaagtcccagacatccttgaggtacacctaccgcacgcacaacctcaagatgccggagtctacagcgcgcgctacattggaggcaaccttttcacatctgctttcacccgcctcattgtcagaagatgcgaagcccaaaaatggggtccagaatgcaaccacctctgtactgcctgcatgaacaacggcgtctgccacgaagacacaggagagtgcatctgtcccccaggcttcatgggccggacgtgcgaaaaagcatgcgagctccacacattcggcagaacctgcaaagaaaggtgctccggccaagaaggatgcaaatcctacgtattttgcctcccagacccatacggatgctcctgcgccaccggctggaaaggactccaatgtaacgaagcctgccaccccggattctacggcccagattgcaaactgcgctgctcatgcaacaacggcgaaatgtgtgaccgattccaagggtgcctctgctcccccggttggcaggggctacaatgcgaacgggaaggtatacaaagaatgacacccaaaatagtcgatctgcccgaccacatagaagtaaacagcggcaaattcaaccccatctgcaaagcatcaggatggccactcccgaccaacgaagaaatgaccctcgttaaacccgacggcaccgtactccaccccaaagacttcaaccacaccgaccacttctcggtagccatcttcaccatccaccgtatactacccccagactccggggtatgggtctgctcagtaaatacagtcgccggtatggtcgaaaaacccttcaacatcagcgtaaaggtcctaccaaaacccctaaacgcaccaaacgtgatcgacaccgggcataacttcgcggtaataaacatatcatcagaaccctactttggagacggcccaatcaaatcaaagaagctgctatacaaaccagtcaatcactacgaagcctggcaacacattcaagtcaccaatgaaatagtgactctcaactacctagagccccgaaccgaatacgaattgtgcgttcaactcgtccgccgtggagaaggcggcgaaggccacccggggcccgtccgtagattcacgacagcctcgatcggacttccaccgccaagaggcctaaacctattgccgaagagtcagaccacactaaacctcacttggcaaccaatatttccctcttcagaggacgacttttacgtagaggtagaacgccgatccgtacaaaaatcagaccaacaaaatataaaagtccccggaaaccttacctccgtcctacttaacaacctccacccccgtgagcaatacgtagttcgcgcccgcgtcaacacaaaagcacaaggagaatggagcgaagacttaaccgcgtggaccctgtcggacatactaccaccccagcccgagaacatcaaaataagcaacatcacccactcatcagccgtcatcagctggacgatcctggatggatacagcatctccagcattacgatacgttacaaagtccaagggaaaaacgaagaccaacacgtcgatgtcaagatcaaaaacgccaccataactcaataccaactgaagggcctcgaacccgaaacagcctaccaggtagacatcttcgctgagaataatatcggaagctcaaacccagccttcagccacgagctagtaaccctaccagaatcacaggcgccggccgacctcggtggaggcaaaatgctactcattgccatactaggaagcgccggcatgacttgtctaaccgtgctcctagcattcctcataatactccagctcaaacgagccaacgtccagaggcgaatggcacaggctttccagaacgtcagagaagaacccgccgtccaattcaacagcggcaccctcgccctcaaccgaaaggtcaagaacaaccccgaccccacgatatatcccgttctcgactggaacgacatcaaattccaggacgtaatcggagaaggcaattttggccaagtactcaaagcccgaatcaagaaagacggccttagaatggacgccgccatcaaacgaatgaaagaatacgcctccaaagacgaccaccgcgattttgcaggcgaactcgaggtcctgtgcaaactcggacaccacccgaacatcatcaacctcctgggggcctgcgaacaccgcggctacctctaccttgccatcgagtacgcaccccacggcaacctattggacttcctccgaaaatccagagtccttgagaccgacccagccttcgccatcgccaactcaaccgctagtacactgtcatcgcaacaactactacactttgccgccgatgttgcacgaggcatggactacttaagtcaaaagcaattcatccaccgcgaccttgccgcacgcaacatcctagtaggcgaaaactacgtagcaaaaattgcagacttcggcctgtcccgaggacaggaagtctacgttaagaaaacgatgggacgcctccccgtcagatggatggcaatagagtcactaaactacagcgtctacaccacaaacagtgatgtctggtcatatggcgtcttactttgggaaatcgtttcgctcggaggcaccccttattgcggcatgacctgcgcagaactctatgagaaacttcctcagggttaccgtctcgaaaagccactaaactgcgacgatgaagtatatgacctcatgcgacagtgctggcgggaaaaaccatacgaacgaccatcattcgctcaaatacttgtaagcctcaaccgaatgctagaagaacgtaaaacatacgtcaacaccaccctctacgaaaaattcacatacgccggcatagactgctcggccgaggaagccgcatag

SEQ ID NO: 4508 - RNA, 1791 nt, synthetic construct
  misc_feature 1..1791: note = BAF84950 variant
  source 1..1791: mol_type = other RNA
atggccgacgccgaagcgcgcgcagagttccccgaagaagcccgcccagaccgaggcacactccaggtactccaagacatggcatcgcgcctacgcattcactccatacgagcaacgtgctccacaagctctggccaccccacatcatgcagcagcagcagcgaaataatgagcgtactcttcttctacatcatgcgctataaacagagcgaccccgaaaaccccgacaacgaccgcttcgtcctcgcaaaacgcctctccttcgtagacgtcgccacaggatggctaggccagggcctcggcgtcgcatgcggcatggcatacactggaaagtacttcgaccgagcctcttaccgagtcttctgcctaatgtcagacggagaatcatcagaaggcagcgtctgggaagcaatggccttcgccagctactactcactcgacaacctagtcgcaatattcgacgtaaatcgcctcggccactccggggccctcccagccgaacactgcataaacatctaccaaagacgctgtgaggctttcggctggaacacctatgtagtagacggtcgcgacgtagaagccctatgtcaagtcttctggcaagcatcacaagtcaaacacaaacccaccgcggtcgtagccaaaacattcaaaggccgcggaaccccctccattgaagacgcagaaagctggcacgcaaagcctatgccccgcgaacgagccgatgctataattaaactaatcgaaagccaaatccaaacgagccgaaacctagacccacaacccccaatcgaagactcaccagaagtaaacataaccgacgtacgcatgacctcaccgcccgactaccgagtgggagacaaaatcgccacccgcaaggcttgcggcctcgcgcttgcaaaactaggatacgcaaacaaccgcgtcgtagtcctagacggagacacacgatacagcacattctccgaaatcttcaacaaagaataccccgaacgattcatagaatgcttcatggcagaacaaaacatggtatcagtcgccctcggctgcgcatcccgaggccgaaccatcgcattcgcctccacattcgccgcattcctaacacgcgccttcgaccatatacggatcggcggcctcgcggaatcaaacatcaacatcataggttcgcactgcggagtctcagtaggagacgacggagcctcccagatggccctcgaggacatagctatgttccgcaccataccaaaatgcacaatattctaccccacagacgccgtctcaaccgaacacgccgtggcactcgccgccaacgcaaaaggcatgtgcttcatccgcaccactcgccccgagaccatggtcatctacacaccacaagaacgcttcgaaataggccaagccaaagtcctccgacactgcgtaagcgacaaagtcaccgtaatcggcgccggaatcaccgtctatgaagccctcgcagcagcagatgaactaagcaaacaggacatcttcatcagagtcatcgacctgttcaccatcaaacccctcgacgtcgcaaccatcgtctccagtgcaaaagctaccgaaggccgaatcatcaccgtcgaagaccactacccccaaggcggcatcggcgaagcagtatgcgcagcagtctcaatggacccagacatccaagtccacagcctagcggtctcaggcgtaccacaatcaggcaagtccgaagaactactcgacatgtacggcatctccgcccgccacatcatcgtcgcagtaaaatgcatgctccttaactaa

SEQ ID NO: 4509 - RNA, 861 nt, synthetic construct
  misc_feature 1..861: note = EAW88722 variant
  source 1..861: mol_type = other RNA
atggcagaggacggggaagaggcagagttccatttcgcggccttgtacataagcgggcaatggcccaggctcagggccgacaccgatctccagcgcttgggctcgagcgcaatggcgccctcacgaaagttctttgtcgggggcaactggaagatgaacggcaggaaacagagcctaggcgagctgataggaacgctcaacgccgcgaaagtgcccgcggacacagaagtagtatgtgccccgccaacagcgtatatcgatttcgcgcgccagaaactggacccgaaaatagccgtggcagcgcaaaactgctataaagtaaccaatggcgcgttcacgggcgagatctcgcccgggatgataaaagattgcggagccacatgggtggtattgggccatagcgagcgcaggcacgtgttcggggagtcggacgagctcataggacaaaaagtggcccatgcattggccgagggcttgggagtgatcgcatgcataggggagaaactagacgaacgcgaggccgggatcacggaaaaggtcgtgttcgagcaaacgaaagtgatagcggacaatgtcaaggactggagcaaggtggtgctcgcgtacgagccagtgtgggcgatagggaccgggaaaacggccacgccccagcaagcgcaagaggtccacgaaaagctcaggggctggctaaaaagcaatgtatcggacgcggtcgcgcaatcgaccagaataatatacgggggatcggtcacgggcgcgacctgtaaagagctcgcaagccagccagatgtggatggctttctcgtgggcggggcctcactcaagcccgagttcgtggacattataaatgccaagcaataa

SEQ ID NO: 4510 - RNA, 357 nt, synthetic construct
  misc_feature 1..357: note = CAA72108 variant
  source 1..357: mol_type = other RNA
atgcccctcgtcgtcgccgtcatattcttctccctctgggtcttcgccctcggccaactcgaacaacccgaaatctccatctcccgccccgccaacaaatccgcccacatctcctggaaagcctccatccaaggcttctcctccaaaatcatccactggtactggcaaaaacccaacaaaggcctcgaatacctcctccacgtcttcctcaccatctccgcccaagactgctccggcggcaaaaccaaaaaactcgaagtctccaaaaacgcccacacctccacctccaccctcaaaatcaaattcctcgaaaaagaagacgaagtcgtctaccactgcgcctgctggatccgccac

SEQ ID NO: 4511 - RNA, 414 nt, synthetic construct
  misc_feature 1..414: note = EAL23985 variant
  source 1..414: mol_type = other RNA
atgctctccctcctccacacctccaccctcgccgtcctaggcgccctctgcgtctacggcgccggccacctcgaacaaccccaaatctcctccaccaaaaccctctccaaaaccgcccgcctcgaatgcgtagtctcaggcatcaccatctccgccacctccgtctactggtaccgcgaacgccccggcgaagtcatccaattcctcgtctccatctcctacgacggcacagtccgcaaagaatccggcatcccctccggcaaattcgaagtcgaccgcatccccgaaacctcaacctcaaccctcaccatccacaacgtcgaaaaacaagacatagccacctactactgcgccctctgggaagtccactcctcccgccaattcgaaccctcccactccatcaacgtctactaa

SEQ ID NO: 4512 - RNA, 366 nt, synthetic construct
  misc_feature 1..366: note = CAA30181 variant
  source 1..366: mol_type = other RNA
atgctctccctcctccacacctccaccctcgccgtcctcggcgccctctgcgtctacggcgccggccacctcgaacaaccccaaatctcctccaccaaaaccctctcaaaaaccgcccgcctcgaatgcgtcgtctccggcatcaccatctccgccacctccgtctactggtaccgcgaacgccccggcgaagtcatccaattcctcgtctccatctcctacgacggcaccgtccgcaaagaatccggcatcccctccggcaaattcgaagtcgaccgcatccccgaaacctccacctccaccctcaccatccacaacgtcgaaaaacaagacatcgccacctactactgcgccctctgggaagtc

SEQ ID NO: 4513 - RNA, 366 nt, synthetic construct
  misc_feature 1..366: note = CAA33345 variant
  source 1..366: mol_type = other RNA
atgctctccctactccacacctccaccctcgccgtcctcggcgccctctgcgtctacggcgccggccacctcgaacaaccccaaatctcctccaccaaaaccctctccaaaaccgcccgcctcgaatgcgtcgtctccggcatcaaaatctccgccacctccgtctactggtaccgcgaacgccccggcgaagtcatccaattcctcgtctccatctcctacgacggcaccgtccgcaaagaatcaggcatcccctccggcaaattcgaagtcgaccgcatccccgaaacctcaacctccaccctcaccatccacaacgtcgaaaaacaagacatcgccacctactactgcgccctctgggaagtc

SEQ ID NO: 4514 - RNA, 2382 nt, synthetic construct
  misc_feature 1..2382: note = AAA93251 variant
  source 1..2382: mol_type = other RNA
atgatggctgctctctacccaagcaccgacctatcaggcgcctcatcctcgtcactcccctcaagcccatcctcctcatcaccaaacgaagtcatggcgctcaaggacgtcagagaggtcaaagaagaaaacaccctcaacgaaaaactcttcctcctcgcatgcgataaaggagactactacatggtgaaaaagatcttagaagaaaactcctccggcgatcttaatataaactgtgtagacgtactcggccgcaacgcagtaactatcaccattgaaaacgagaacctcgacatcctccagctactccttgactacggctgccaatccgccgatgcactactcgtcgccatcgactcagaagtagtaggcgcagtagacatcctcctcaaccaccgccccaaacgaagctcccgacccaccatcgtaaaactcatggaacgaatccaaaatcccgaatactccaccactatggacgtcgccccagtaatcctcgccgcccaccgcaacaactacgaaatcctcaccatgctcctcaagcaagacgtctccctccctaaaccacacgcggttggatgcgagtgcacactttgctccgccaaaaacaagaaagactcactccggcactcacgcttccgtttagacatctaccgctgccttgcatcccccgcccttataatgctaacagaggaagaccccatcctgcgggccttcgaactctccgccgatcttaaagagctatcacttgtcgaagtggagttccgaaacgactacgaagaactcgcccgccaatgcaaaatgttcgccaaggacttactagctcaagcacgaaactcccgcgaactcgaagtcatccttaaccacacatcttccgacgaacccctcgacaaacgtggccttctagaagaacgcatgaacctcagccgactgaaactagcaataaaatacaaccaaaaagagttcgtctcccaatccaactgccaacagttcctcaacacagtatggttcggacaaatgtccggctaccgccgtaaacccacatgcaagaagatcatgaccgtactcaccgtaggcatcttctggcccgtcctttcgctctgctacttgatagcacccaagtcccagttcggcaggatcatccacacccccttcatgaaatttattattcacggcgccagctacttcaccttccttctcctcctaaatctttactccctcgtatacaacgaagacaagaagaacacaatgggccccgccctcgagcgcatcgattacctactgatcctgtggatcataggcatgatctggagcgacataaaacggctctggtacgagggccttgaagacttcttagaagaatcacgaaaccaactgagcttcgtaatgaactctctctatcttgccacattcgcactaaaagttgtcgcccataataaattccacgacttcgctgaccgaaaagactgggacgccttccaccccaccctagtcgccgaaggactgttcgccttcgccaacgtcctctcctaccttcgcctattcttcatgtacaccactagctccattctcggcccccttcaaatttctatgggccaaatgctacaagacttcggtaagttcctaggaatgtttctcctcgtcttattctccttcaccatcggcctcacccagctctacgacaagggatacacctctaaagaacagaaagactgcgtcggcatcttctgcgaacaacaatccaacgacactttccactccttcatcggcacttgtttcgcactattctggtacatattttccctcgcccacgtagccatattcgtcacccgcttcagttacggcgaagaactccaatcgtttgtcggcgccgtcatcgtcggaacgtacaatgtcgtcgtcgtaatagtcctaacaaaacttctggtggccatgctccacaaatcattccaactaatcgccaaccacgaggacaaagaatggaaattcgcacgcgccaaactctggctctcatattttgatgacaagtgcaccctcccacccccgttcaacataatccccagccccaaaacaatatgctacatgattagctccctctccaaatggatctgctcccacacaagcaaagggaaggtaaaacgccagaactccctcaaggaatggcgcaacctcaagcagaaacgcgacgaaaactaccaaaaagtcatgtgctgcctagtacatcgttacctcacatccatgcgccagaaaatgcaaagcactgatcaagctacggtagaaaatctcaacgagctccgccaagacctctccaaattccgcaacgaaattcgggaccttctaggttttcgcacctcaaagtacgccatgttctaccctagaaactga

SEQ ID NO: 4515 - RNA, 3315 nt, synthetic construct
  misc_feature 1..3315: note = AAZ73614 variant
  source 1..3315: mol_type = other RNA
atgagcttccgcgccgcccggctgtccatgcgcaaccggcgcaacgacaccctcgacagcacccggacgctgtactccagcgcgtcccgcagcaccgacctgtcctacagcgagtccgacctcgtgaacttcatccaggccaatttcaagaagcgggagtgcgtcttcttcaccaaggacagcaaggccaccgagaacgtgtgcaagtgcggctacgcccagtcccagcacatggaggggacacagatcaatcagagcgagaagtggaactacaagaagcacaccaaggagttccccaccgacgcctttggcgacatccagttcgagaccctggggaagaagggcaagtacatccgcctgtcctgcgacacggacgcggagatcctctacgagctgctgacccagcactggcacctcaagaccccgaacctggtgatcagcgtcaccgggggcgccaagaacttcgccctgaagccccggatgcgcaagatcttctcccggctcatctacatcgcccagagcaaaggcgcgtggatcctgaccgggggcacgcactacgggctaatgaagtacatcggcgaggtggttcgcgacaacaccatctcccggagctccgaggagaacatcgtcgccatcgggatcgccgcctggggcatggtgagcaaccgcgacacactcatccggaactgcgacgccgagggctacttcctggcgcagtacctgatggacgacttcacgcgcgaccccctctacattctggacaacaaccacacccacctcctcctggtggacaacgggtgccacggccaccccaccgtcgaggccaagctgcggaaccaactcgagaagtacatcagcgagcgcaccatccaggactccaattacgggggcaagatcccgatcgtgtgcttcgcacaaggcgggggcaaggagacgttaaaggccatcaacaccagcatcaagaacaagatcccctgcgtggtcgtggaggggtccggccagatcgccgacgtgatcgcgagcctggtcgaggtggaggacgccctcacttccagcgccgtgaaggagaagctggtccggttcctgccccgcaccgtgtcccggctccccgaggaggagacagagagctggatcaagtggctgaaggagatcctggagtgctcccacctcctgaccgtaatcaagatggaggaggccggggacgagatcgtcagcaacgccatctcctacgcgctgtacaaggccttcagcacctccgagcaggacaaggacaactggaacggccagctcaagctgctgctcgagtggaaccagttggacttggccaacgacgagatcttcaccaacgaccggcgctgggagagcgccgacctccaggaggtgatgttcacggccctaatcaaggatcggccgaagttcgtgcgcttattcctcgagaacggcctgaacctgcggaagttcctcacccacgacgtcctgaccgagctgttctccaaccactttagcaccctggtgtaccgcaacctccagatcgcgaagaactcttacaatgacgccctgctgacgttcgtctggaagctggtggccaacttccggcgcggctttcggaaggaggaccgcaacggccgggacgagatggacatcgagctgcacgatgtgagccccatcacccgccaccccctgcaggccctattcatctgggcgatcctgcagaacaagaaggagctgtccaaggtcatctgggagcagacccggggctgcaccctcgccgccctgggcgccagcaagctgttgaagacgctggccaaggtcaagaacgacattaacgcggccggggagtctgaggagctggccaacgagtacgagacccgcgccgtggagctgttcaccgagtgctactccagcgacgaggacctggccgagcagctgctcgtctactcctgcgaggcgtggggcggcagcaactgcctggagctggccgtggaggccaccgaccagcactttatcgcccagcccggggtgcaaaacttcctctccaagcagtggtacggcgagatcagccgggacaccaagaactggaagatcatcctgtgcctgttcatcatcccgctcgtcgggtgcggcttcgtgtccttccgtaagaagcccgtggacaagcacaagaagctgctgtggtactacgtcgcctttttcacgagccccttcgtggtgttctcctggaacgtcgtgttctacatcgcgttcctcctgctgtttgcctacgtgctcctgatggactttcacagcgtcccccaccctcccgagctggtgctctactccctggtattcgtcctgttctgtgacgaggtgcggcagtggtacgtgaacggggtcaactacttcaccgacctctggaacgtgatggacaccctgggcctgttctacttcatcgctggcatcgtgttccgcctccacagctccaataagagctccctgtacagcgggcgggtcatcttctgcctggactacatcatctttaccctccgcctgatccacatcttcacggtgtcccggaacctgggccccaaaatcatcatgctccagcgtatgctcatcgacgtgttcttcttcctgttcctcttcgccgtctggatggtggcgttcggggtcgcccgccagggcatcctgcggcagaacgaacagcgctggcggtggatcttccgcagcgtcatttacgagccctacctggccatgttcggccaggtgccgagcgacgtggacgggaccacctacgacttcgcccactgcacctttacggggaacgagtccaagcccctctgcgtcgagctggacgagcacaacctgccccggttccccgagtggatcaccatcccgctcgtgtgcatctacatgctgagcaccaacatcctgctcgtcaacctgctggtcgccatgttcgggtacaccgtgggcacggtgcaggagaacaacgaccaggtctggaagtttcagcgctacttcctcgtgcaagaatactgctcccggctgaacatccccttccccttcatcgtgttcgcgtacttctacatggttgtgaagaagtgcttcaagtgctgctgcaaggagaagaacatggagagctccgtgtgctgcttcaagaacgaggacaacgagaccctggcctgggagggggtcatgaaggagaactacctcgtgaagatcaacaccaaagccaacgacaccagcgaggagatgcgccaccggttccgccagctggacacaaagctgaacgacctcaagggcctgctgaaggagatcgccaataagatcaagtga

SEQ ID NO: 4516 - RNA, 2097 nt, synthetic construct
  misc_feature 1..2097: note = AAK13079 variant
  source 1..2097: mol_type = other RNA
atgatgcgctcccgctcaaaaagcccccgccgccccagcccaacagcccgaggcgcaaactgtgacgtagaactcctaaaaacgaccacaagggaccgagaagaactcaaatgcatgctagaaaaatacgagagacacctagccgagattcaaggaaacgtcaaggtgctaaaatccgaacgcgacaaaatattcttgctctacgaacaggcacaagaagaaataacacggttacgaagagaaatgatgaaaagctgtaagtccccaaaatcaaccaccgcgcacgcaatactcaggcgcgtagaaaccgaacgcgacgtcgccttcaccgacctgcgccgcatgaccacggaacgagacagcctacgagaaagactgaagatcgcccaggaaaccgcctttaacgaaaaggcgcacctagaacagcgtatagaagaactcgagtgcaccgtacacaatctcgacgacgaaaggatggaacaaatgagcaacatgaccctcatgaaagaaacaatcagcacagtcgaaaaagagatgaaaagcctagcgaggaaagccatggacaccgaaagcgaactcgggcgccaaaaagcagaaaacaactccctacggctcctgtacgagaataccgaaaaggacctcagcgatactcaacgccacctcgccaaaaagaaatacgaactacaactaacacaagaaaagatcatgtgcctcgatgagaaaatcgacaacttcaccagacaaaacatagcacagcgcgaagaaatctcgatactcgggggcacactcaacgatttggcaaaagagaaagagtgcctccaggcatgcctagacaagaaatccgaaaacatagcctccctaggagaatcgctagcaatgaaagagaaaaccatctccggcatgaaaaacataatcgcagaaatggaacaagcatcgcgccaatgcacagaagcgcttatagtctgcgaacaggacgtctcccgaatgagacgccagctcgacgaaacgaacgacgaactagcccagatagcacgcgaacgcgacatactagcacacgacaacgacaacctgcaggaacaattcgccaaagccaaacaggaaaaccaagcactctcaaagaaactcaacgacacgcacaacgaacttaacgatatcaaacaaaaagtacaggacacaaacctagaagtaaacaaactcaaaaacatcctaaaatccgaagaaagtgagaatcggcaaatgatggaacaattacgaaaggcaaacgaggacgcagagaactgggaaaacaaagcaagacaaagcgaagccgacaacaacacgctcaaacttgaactaatcacggcagaagccgagggcaaccgactaaaggaaaaagtcgacagcctaaaccgagaagtcgaacagcatctcaacgccgagaggtcctataagtcccaaatcagcacgctccacaaatcagtagtcaaaatggaagaagaactacaaaaagtacaattcgaaaaagtaagcgcgctagccgacctaagcagcacccgagaactatgcatcaaactcgacagcagcaaggaattactcaaccgtcaactcgtggcaaaagaccaggaaatagaaatgcgcgaaaacgagctcgacagcgcacacagcgaaatagaactgctacggagccagatggcaaacgaacgaataagcatgcaaaacctcgaggccctgctagtagccaaccgcgacaaggaataccaaagccaaatagcactacaggaaaaagagagcgaaatacaattactaaaggagcacctctgcctcgcagaaaacaagatggccatacaaagcagagacgtcgcccagttccgcaacgtcgtcacccaactagaagctgacctagacatcacgaaacgacaactcggcaccgaaaggttcgaacgagaacgcgccgtacaagaactgcgacggcaaaactacagctccaacgcataccacatgagctccaccatgaaacccaacacaaaatgccacagcccagaaagagcgcaccaccgctcgccggaccgcgggctcgaccgcagcctcgaagagaacctgtgctaccgagacttctga

SEQ ID NO: 4517 - RNA, 927 nt, synthetic construct
  misc_feature 1..927: note = CCDS48205.1 variant
  source 1..927: mol_type = other RNA
atgcggcccgaaggaagcctcacataccgcgtccccgaacgcctacggcaaggcttctgcggcgtcggccgagcagcacaagccctcgtctgcgcgagcgcaaaagaaggcacagccttccgaatggaagcggtacaagaaggcgcagccggcgtagaatcggaacaagccgccctaggcgaagaagccgtactcctcctagacgacataatggcagaagtagaagtagtagccgaagaagaaggcctagtagaaagaagagaagaagcacaaagagcacaacaagccgtccccggccccggccccatgacacccgaaagcgcaccagaagaactcctagccgtccaagtcgaactcgaaccagtaaacgcacaagcacgcaaagccttcagccgacaaagggagaaaatggaacgccggcgcaaaccccacctagaccgccgaggcgcagtcatccaatcagtccccggcttctgggccaacgtaatcgccaaccacccccaaatgtccgccctcataaccgacgaagacgaagacatgctcagctacatggtctcactcgaagtcggcgaagaaaaacaccccgtacacctctgcaaaataatgctattcttccgaagcaacccctacttccaaaacaaagtaatcacaaaagaatacctcgtaaacatcaccgaataccgagccagccactcaaccccaatagaatggtaccccgactacgaagtcgaagcataccgcagacgacaccacaacagctccctcaacttcttcaactggttctccgaccacaacttcgccggcagcaacaaaatcgccgaaatcctgtgcaaagacctctggcgaaacccactacaatactacaaacgaatgaaaccacccgaagaaggaaccgaaaccagcggagactcacaactcctctcctga

SEQ ID NO: 4518 - RNA, 369 nt, synthetic construct
  misc_feature 1..369: note = M13231.1 variant
  source 1..369: mol_type = other RNA
atgcgctgggccctcctcgtcctcctcgccttcctctcccccgcctcccaaaaatcctccaacctcgaaggccgcaccaaatccgtcacccgccaaaccggctcctccgccgaaatcacctgcgacctcacagtcaccaacaccttctacatccactggtacctccaccaagaaggcaaagccccccaacgcctcctctactacgacgtctccaccgcccgcgacgtcctcgaatccggcctctcccccggcaaatactacacccacaccccccgccgctggtcctggatcctccgcctccaaaacctcatcgaaaacgactccggcgtctactactgcgccacatgggaccgccaaaaactcctctaa

SEQ ID NO: 4519 - RNA, 804 nt, synthetic construct
  misc_feature 1..804: note = CCDS12619.1 variant
  source 1..804: mol_type = other RNA
atgggcgcacgacaaatacaaacaagctcatcccaaacatcccccgaagaagccatgggcacaccccgaatccaacacctcctcatccttctcgttctcggcgcctccctcctcacctctggcctagaactctactgccaaaaaggcctatccatgaccgtcgaagccgaccccgccaacatgttcaactggaccaccgaagaagtagaaacctgcgacaaaggcgccctctgtcaagaaaccatcctcataatcaaagccggcaccgaaaccgccatcctcgccacaaaaggctgcatccccgaaggtgaagaagccatcacaatcgtccaacactcctcaccacccggcctcatcgtaacatcctactccaactactgcgaagactccttctgcaacgacaaagactccctatcccaattctgggagttctccgaaaccaccgcatcaaccgtatccaccacactccactgcccaacctgcgtcgccctaggaacctgcttctccgccccctccctcccctgccccaacggcaccacccgctgctaccaaggcaaactcgaaatcaccggcggcggcatcgaatcatccgtcgaagtaaaaggctgcaccgccatgatcggctgcagattaatgtccggcatcctcgccgtcggccccatgttcgtccgagaagcctgcccccaccaactactcacccaaccccgaaaaaccgaaaacggcgcaacctgcctacccatccccgtctggggcctacaactccttctccccctcctactaccctccttcatacacttctcctaa

SEQ ID NO: 4520 - RNA, 1590 nt, synthetic construct
  misc_feature 1..1590: note = AHZ44440 variant
  source 1..1590: mol_type = other RNA
atgctcctcgccgtcctctattgtcttctctggtcattccaaacgtccgccggacatttcccacgcgcctgcgtctcctccaaaaatctaatggaaaaagaatgctgtcccccatggtcaggcgatcgatcaccttgcggccaactctccggacgcggatcctgccaaaacatcctactttccaacgctcccctcggcccccaattccccttcacgggagtcgacgaccgcgaatcctggccatcagtcttctacaaccgaacctgccaatgctcaggcaacttcatgggcttcaactgcggtaactgcaagttcggcttctggggaccaaactgcaccgaacgccgcctactcgtacgccgaaacatctttgacttatccgcacccgaaaaagacaaattcttcgcatacctcaccctcgcaaaacacaccatctctagcgactacgtcatccccatcggaacatacggtcagatgaaaaacggctccacacccatgttcaacgacattaatatctatgacctcttcgtctggatgcactactacgtatccatggacgccctcctgggcggctccgaaatatggcgagacatcgatttcgcgcacgaagcaccagcctttctcccctggcatagactctttctgctccgctgggaacaagaaatccaaaaactcaccggcgacgaaaacttcacaatcccatactgggactggcgcgacgccgaaaaatgcgacatctgtaccgacgaatacatgggagggcaacacccaacaaaccccaaccttctctcccctgcttccttcttctcctcctggcaaatagtctgctctcgcctagaagaatacaactcccaccaatccctttgcaacggcacacccgaaggcccactccgacgcaaccccggaaaccacgacaaaagccgcacaccccgcctcccctcttccgccgacgtcgaattttgcctctcactcacccaatacgaatccggctccatggataaagcagccaacttcagtttccgcaacacccttgaaggcttcgcctcacccctcacaggcatcgccgacgcctcccaatcctccatgcacaacgccctccacatctacatgaacggcaccatgtcccaagtccaaggctccgccaacgacccaatcttcctcctacaccacgccttcgtcgactccatattcgaacaatggctacgccgacaccgacccctacaagaagtctacccagaagcaaacgccccaatacgccacaatcgtgaatcatacatggtccccttcatacccctctaccgcaacggagacttcttcatatccagcaaagacctcggctacgactactcctacctccaagacagcgaccccgactccttccaagactacatcaaatcatatctcgaacaagcctcccgaatctggtcctggctcctcggtgccgcaatggtcggcgccgtcctcacagccctactagccggcctagtctccctcctgtgccgacacaaacgcaaacaactccccgaagaaaaacaacccctcctcatggaaaaagaagactaccactctctttaccaatcccacctctaa

SEQ ID NO: 4521 - RNA, 1590 nt, synthetic construct
  misc_feature 1..1590: note = AGV39051 variant
  source 1..1590: mol_type = other RNA
atgctcctcgctgtactatactgcttactctggtcatttcaaacatcagccggacatttcccgcgcgcatgcgtctcctccaaaaaccttatggaaaaagaatgctgcccaccatggtcaggcgaccgctccccctgcggtcagctctccggccgcggatcatgtcaaaacatcctcctatcaaacgcacccctcggcccccaattccccttcaccggagtagacgaccgcgaaagctggccatccgtcttctataaccgaacctgccaatgctcaggaaacttcatggggtttaactgcggcaactgcaaattcggattctggggcccgaactgcacggaacgccgtctactggtccgccgcaacatcttcgacctatccgccccagaaaaagataaatttttcgcctacctcaccctcgccaagcacaccatctcatccgactacgtcatccccatcggcacctacggccaaatgaaaaacggatccacccccatgtttaacgacatcaacatttacgacctcttcgtatggatgcactattacgtatccatggacgccctcctaggcggatcagaaatctggcgcgacatagactttgcccacgaagcaccagccttccttccctggcaccgactcttcttactccgatgggaacaagaaatccaaaaactaaccggcgacgaaaacttcaccatcccctactgggactggcgtgacgccgaaaaatgcgacatatgcaccgatgaatacatgggaggccaacatccaaccaaccccaacctcctcagcccggcctcgttcttctccagctggcaaatagtctgctcccgcctagaagaatacaacagccaccaaagcctctgcaacggcacacccgaagggcccctacgacgcaaccccggcaaccacgacaaatcacgtacaccccgcctcccctcctccgccgacgtcgagttctgcctctccctcacacaatacgaaagcggatcaatggacaaagccgcaaacttttcattccgaaacactctggaaggattcgcatcacccctcacaggcatagccgacgccagccaatcatccatgcataacgccctacacatctatatgaacggaaccatgagccaagtccaaggctctgcgaacgaccccatcttcctcctccaccacgccttcgtagactccatattcgaacaatggctccgccgccaccgccccctccaagaagtctaccccgaagcaaacgcccccatcggccacaaccgcgaatcctacatggttcccttcatccccctataccgcaacggagacttcttcatctcttccaaagacctcggctacgactactcctacctacaagactctgaccctgactccttccaagactacatcaaatcatatctcgaacaagcctcacgcatctggtcctggctactcggcgccgcaatggtcggcgccgtcctaacagccttactcgccggcttagtatcccttctatgccgccacaaacgtaaacagctcccagaagaaaaacaacccctcctcatggaaaaggaagactaccactcactctaccaatcccacctctga

SEQ ID NO: 4522 - RNA, 1590 nt, synthetic construct
  misc_feature 1..1590: note = AGV39049 variant
  source 1..1590: mol_type = other RNA
atgctcctcgccgtcctctactgcctcctctggtccttccaaacatccgcaggacacttcccccgtgcttgtgtctcctccaaaaacctaatggaaaaagaatgctgcccaccctggtcaggagacagatccccatgcggccaactatcaggccgaggctcctgccaaaacatactactatccaacgcgcccctcggcccccaattcccattcactggggtcgacgaccgtgaatcatggccctctgtattctacaaccgcacctgtcagtgctcaggaaacttcatgggattcaactgcggaaactgcaaattcggcttctggggccccaactgcaccgaacgccgcctactcgtccgccgcaacatcttcgatctctcagccccagaaaaggacaaattcttcgcctacctaaccctcgccaaacacacaatcagctctgactacgtcatacccatcggcacctacggccaaatgaaaaacggctccacccccatgttcaacgacataaatatctacgatttattcgtctggatgcactattacgtctccatggatgccctcctaggcggcagcgaaatctggcgggacatcgacttcgcacacgaagcccccgccttcctcccctggcaccgcctctttctcctccgatgggaacaagaaatccagaaactaaccggtgacgaaaacttcaccattccctactgggactggcgcgacgcagaaaaatgcgacatatgcacagacgaatacatgggcggacaacaccccacaaaccccaacctactatctcccgcctcctttttctcctcttggcaaattgtctgctcccgactcgaagaatataactcacaccaatccctctgcaacggcacccccgaaggccccctccgccgtaaccccggcaaccacgacaaatccagaactccccgccttccatcctcagccgacgtagaattttgcctttccctcacccaatacgaatccggctccatggacaaagccgccaacttctccttccgtaacaccctagaaggctttgcctcaccacttaccggcatcgccgacgcctcccaatcctccatgcacaacgccctacacatatacatgaacggaaccatgtcccaagtccaggggtccgcgaatgacccaatcttcctactccaccacgccttcgtcgactctatctttgaacaatggctacaacgacaccgacccctccaagaagtatacccagaagccaacgcccctatcggccacaaccgcgaatcttatatggtccccttcatccccctataccgcaacggggacttcttcatatcctcgaaagatctcggctacgactactcctacctccaagattccgatccagactccttccaagactacatcaaatcctacctcgaacaagcctcacgcatctggtcctggctccttggtgcagccatggtcggagccgtccttaccgcacttcttgccggactggtcagcctcctatgccgccacaaacgcaaacaactgcccgaagagaaacaaccactcctcatggaaaaagaagactaccactccctctaccagtctcacctctag

SEQ ID NO: 4523 - RNA, 1590 nt, synthetic construct
  misc_feature 1..1590: note = AGV39050 variant
  source 1..1590: mol_type = other RNA
atgctgctagccgtcctatactgcctcttatggtcattccaaacctccgccggccatttcccccgagcctgcgtatcatcaaagaacctcatggaaaaagaatgctgtccaccctggtcaggagatcgctcaccctgcggccaactatcaggccgaggctcttgccaaaacatcctcctctcaaacgcacccctcggcccccaattccccttcaccggcgtcgacgaccgcgaatcttggccaagcgtcttctacaaccgcacatgccaatgctcaggcaacttcatggggttcaactgcggcaactgcaaattcggcttctggggccccaactgcaccgaacgccgccttttagtccgccgcaacatattcgacctctccgcccccgaaaaagataaatttttcgcctacctcacactcgccaaacacaccatatcctccgactacgtcatccccatcggcacctacggccaaatgaagaacggctccacaccaatgttcaacgacatcaacatatacgacctcttcgtctggatgcactactatgtctccatggacgccctactcggcggatacgaaatctggcgagacatcgacttcgcgcacgaagccccagccttcctcccctggcaccgccttttcctcctccgctgggaacaagagatacaaaaattaacaggcgacgaaaacttcaccatcccatactgggactggcgcgacgccgaaaaatgcgacatctgcaccgacgaatacatgggcggccaacaccccacaaaccctaacttactttccccagcatccttcttcagctcctggcaaatcgtctgctcccgtctagaggaatacaactcccaccaatccctatgcaacggcaccccagaaggcccgctccgccgcaaccccggaaaccacgacaaatcccgcactccccggctcccctcatccgccgacgttgagttctgcctgtcactcacccaatacgaatccggatccatggacaaagctgcaaacttctccttccgcaacacccttgaaggcttcgccagcccccttaccggcatcgccgacgcatcccaatcgtccatgcacaacgcactccacatctacatgaacggcaccatgtcccaagtacagggctcagccaacgatcccatcttcttgctacaccacgccttcgtcgactccatcttcgaacaatggctacgccgacaccgcccactccaagaagtctaccccgaagcaaatgcccctatcggccataaccgcgaatcatacatggtccccttcatccccctctatcgcaacggcgacttcttcatcagctccaaagatctcggatacgactactcctacctacaagactccgaccccgactcattccaagactacatcaaatcctacctcgaacaggcttcccgcatctggtcctggcttctaggcgccgccatggtaggagcagtactcaccgccctactggccggactcgtttcacttctttgccgacacaagagaaaacaactcccagaagaaaaacaacccctccttatggaaaaagaagactaccactccctttaccaatcccacctctaa

SEQ ID NO: 4524 - RNA, 714 nt, synthetic construct
  misc_feature 1..714: note = CAA04137 variant
  source 1..714: mol_type = other RNA
atgtccccactatggtggggcttcctcctctcctgcctcggatgcaaaatcctccccggcgcccaaggacaattcccccgcgtctgcatgaccgtcgactcactcgtaaacaaagaatgctgcccacgcctcggcgccgaatccgccaacgtctgcggatcccaacaaggccgcggccaatgcacagaagtccgcgccgacacccgcccctggtcaggaccctacatcctccgcaaccaagacgaccgcgaactatggccccgcaaattcttccaccgcacctgcaaatgcaccggcaacttcgccggctacaactgcggcgactgcaaattcggatggaccggccccaactgcgaacgcaaaaaaccccccgtcatccgccaaaacatccactccctctccccacaagaacgcgaacagttcctcggcgccctcgacctcgcaaaaaaacgcgtccaccccgactacgtcatcacaacacaacactgggtcggcctactaggccccaacggcacccaaccccaattcgccaactgctccgtctacgacttcttcgtctggctccactactactccgtccgcgacaccctcctcggcggcttcttcccctggctcaaagtatactactaccgcttcgtcatcggactccgcgtctggcaatgggaagtcatctcctgcaaactcatcaaacgcgccaccacccgccaaccctaa

SEQ ID NO: 4525 - RNA, 1590 nt, synthetic construct
  misc_feature 1..1590: note = AAA61242 variant
  source 1..1590: mol_type = other RNA
atgctactcgctgtcctatactgcctcctctggagcttccagacaagcgcaggccacttcccccgagcatgcgtctcctccaaaaacctcatggaaaaggaatgctgcccaccatggtccggtgaccgatcaccatgcggccaactctccggccgaggctcatgccaaaacatcctcctctccaacgcgccgctcggcccacaattccccttcacaggcgtagacgaccgagaatcctggccctccgtattctacaatcgaacctgccaatgctccggaaacttcatggggttcaactgcggtaactgcaaattcggcttctggggccccaactgtacagaacgccgcctcctagtcagaaggaacatattcgacctctcagcccctgaaaaagacaaattctttgcctacctaaccctagccaaacatacaatctcatccgactacgtcataccaatcggcacatacggtcaaatgaagaacggctcaacccccatgtttaacgacatcaacatctacgaccttttcgtctggatgcactactacgtcagcatggacgcgctccttggaggaagcgaaatctggcgcgacatcgactttgcccacgaagcaccagcattcctcccttggcaccgactcttcctcctacgctgggaacaagaaatccaaaaactcacaggcgacgaaaacttcacaatcccatactgggactggcgcgacgccgaaaaatgcgacatatgcaccgacgaatacatgggcggccaacacccaaccaacccaaacttactctcccccgcatccttcttctcctcctggcaaatcgtctgctcacgcctagaagaatacaactcccaccaatccctatgcaacggaacccccgaaggccccctccgcagaaaccccggcaaccacgacaaaagccgcacccctcgcctaccctcctccgctgacgtagagttctgcctctccctcacacagtacgaatctggcagcatggataaagccgctaacttctccttcagaaacaccctcgaaggcttcgccagcccccttaccggaatcgccgacgcctcccaatcctccatgcacaacgcactccacatctacatgaacggcaccatgtcccaagtccaaggttccgccaacgaccccatcttcctcctccaccatgccttcgtagactccatattcgaacaatggcttcgacgccaccgcccgctacaggaagtataccctgaagcaaatgcccccataggccacaaccgcgagtcatacatggtccctttcatccccctctaccgcaacggcgacttcttcatatcctccaaggacctaggatacgactatagctacctccaagacagcgacccagactccttccaagattacataaaatcatatctcgagcaagctagccgaatctggtcctggctcctcggcgccgccatggtaggagcagtcctcactgcccttctcgccggcctcgtctcactactctgtcgccacaaaagaaaacaactaccagaagaaaaacaacccctcctcatggagaaagaagactaccactccctctaccaatcccacctctaa

SEQ ID NO: 4526 - RNA, 1590 nt, synthetic construct
  misc_feature 1..1590: note = AGV39054 variant
  source 1..1590: mol_type = other RNA
atgctcttagccgtgctatactgcctcctatggtcattccaaacctccgcgggacacttcccccgcgcctgcgtatcctccaagaacctcatggaaaaggaatgctgcccaccctggtccggcgaccgctccccctgcggacaactttccggccgcgggtcctgccaaaacatcctactcagcaacgcacccctcggaccccaattccccttcactggcgtcgacgaccgagaatcctggccatccgtcttctacaaccggacctgccaatgttcagggaacttcatgggcttcaactgtggaaactgcaagttcggcttctggggacccaactgcaccgaacgccgcctcctcgtacgcagaaatatattcgacctatccgcccccgaaaaagacaaattctttgcatacctaaccctggccaaacatacaatctcctccgactacgttatccccattggcacctacggacaaatgaaaaacggctccacacccatgttcaacgacatcaacatttacgacctattcgtctggatgcactactatgtctccatggacgccctcctcggcggctccgaaatctggcgcgatatagacttcgcacacgaagcaccagcctttctcccctggcaccgactcttcctcctacgatgggaacaagaaatacaaaagctcaccggagacgaaaactttacaatcccatactgggactggagagacgccgaaaaatgcgacatatgcacagacgaatacgtcggcggccaacaccccacaaaccccaacctcctctcccccgcatcattcttttcatcatggcagatcgtctgttccagactagaagaatataactcccaccaatccctctgcaacggcacacctgaaggtcccctccgtcgcaaccccggcaaccacgacaaatcccgcacaccccgcctaccttcctcggcagatgtcgagttctgcctctccctcacccaatacgaatcaggatccatggacaaagccgccaacttctccttccgtaacacccttgaaggctttgcatccccactgaccggtatagccgacgcatcccaatcctccatgcacaacgcactccacatatacatgaacggcaccatgtcacaagtccaaggctccgccaacgatcccatcttcctactccaccacgccttcgtcgactccatattcgaacaatggctccgacgccaccgacccctccaagaagtctatcccgaagccaacgcccccataggtcacaaccgcgaatcctacatggttcccttcatccccctttaccgcaacggcgacttcttcatatcatccaaagacctcggctacgactactcttacctccaagactcggaccccgactccttccaagattacatcaaatcatacctcgaacaagcctcacggatttggagctggctcctcggcgccgccatggtcggagcagtcctaaccgcactcctagctggcctagtaagtctcctatgccgacacaaacgcaaacaacttcccgaagagaaacaacccttacttatggaaaaagaagactaccactcactctaccaatctcacctctaa

SEQ ID NO: 4527 - RNA, 1590 nt, synthetic construct
  misc_feature 1..1590: note = AGV39162 variant
  source 1..1590: mol_type = other RNA
atgctcctagcagtcctctactgccttctatggtcatttcaaacctccgccggccatttcccccgcgcctgcgtctcctcgaaaaacctcatggagaaagaatgttgtcccccatggagcggagaccgctcaccctgcggacaactctccggccgaggctcctgccaaaacatcctactctcaaacgctcccctaggcccccaattcccattcaccggagtcgacgaccgcgaatcctggccctctgtattctacaaccgaacctgccagtgctccgggaactttatgggcttcaactgcggcaactgcaaatttggcttctggggaccaaactgcaccgaacgccgcctcctagtccgtagaaacatcttcgacctctccgccccagaaaaagacaaattcttcgcctacctaaccctcgccaaacacaccatctcctcagactacgtcatccccatcggcacctacggccaaatgaaaaacggctccaccccaatgttcaacgacatcaacatttacgacctattcgtttggatgcactactacgtctccatggacgccctcttaggaggctcggaaatttggcgagacatcgacttcgctcacgaggcacccgctttccttccctggcaccgcctattcctgctacgatgggaacaagaaatccagaaactcaccggcgacgaaaacttcaccattccatactgggattggcgcgacgccgaaaaatgcgacatctgcacagacgagtacatgggtggtcaacaccccacaaaccccaaccttctgtcacccgcatccttcttttcctcctggcaaatcgtatgctcccgcctagaagaatacaactcccatcaatcactctgcaacggcacacccgaaggcccactccgccgtaaccccggcaaccatgacaaatcccgcacacctcgcctcccctctagcgccgacgtcgaattttgcctatccctcacccaatacgaatccggctcaatggataaagcagccaatttctccttccgcaacacccttgaaggcttcgcctcgcccctaacaggcatcgccgacgcatcccaatcctccatgcacaacgccctccacatctacatgaacggaacaatgtcccaagttcaaggctcagcaaacgatccaatcttcctcctccatcacgcattcgtcgactcaatcttcgaacaatggctccgccgccaccgcctcctacaagaagtctaccccgaagcaaacgcacctatcggccacaaccgcgaatcatacatggtcccattcatccccctctaccgcaatggcgacttcttcatctcctccaaagacctcggatacgattattcctacctccaagactccgaccccgactcctttcaagactacattaaatcatacctcgaacaagcatccagaatctggtcttggctactcggagctgccatggtcggcgccgtgctcacagccctcctcgccggactcgtctcacttctctgccgccacaaacgcaagcaactacctgaagaaaaacaaccactcctcatggaaaaagaagactatcactccctctaccaatcccacctctaa

SEQ ID NO: 4528 - RNA, 1590 nt, synthetic construct
  misc_feature 1..1590: note = AGV39086 variant
  source 1..1590: mol_type = other RNA
atgttactcgcagtcctctactgcctactctggtcatttcaaacctccgccggacacttccccagagcatgcgtctccagcaaaaacctcatggaaaaagaatgctgtccaccctggtccggcgaccgatcaccctgcggacaactgtccggccgcggatcctgccaaaacatcctcctatcaaacgcgcccctcggaccccaattccccttcaccggggtcgacgaccgtgaatcttggccctccgtcttctacaaccgcacatgccagtgctccggtaacttcatgggcttcaattgcggtaactgcaaattcggcttctggggccccaactgtaccgaacgtcgcctcctcgtccgccgcaacatattcgacctatcagcccctgagaaagacaaattcttcgcgtacctcaccctcgccaaacacaccatctcctctgactacgtaatcccaattggtacctacggccaaatgaaaaacggctccacccccatgttcaacgacatcaacatatacgacctctttgtctggatgcactactacgtttccatggacgcactactcggcggcagcgaaatatggcgagacatcgacttcgcccacgaagcccccgctttcctaccatggcacagactcttcctactccgctgggaacaggaaatccagaaactcacaggcgacgagaacttcacaatcccctactgggactggcgcgacgcagagaaatgcgacatctgtaccgacgaatacatgggcggccaacaccccaccaacccaaacctcctatcccccgcatcctttttctcctcctggcagatagtctgcagccgactcgaggaatacaactcccaccaatctctctgcaacggtacacccgaaggcccccttcgtcgtaaccccggcaaccacgacaaatcccgcacacccagactcccctcctcagccgacgtcgagttctgcctctcactcacccaatacgaatctggaagcatggacaaagccgccaacttctccttccgcaacaccctcgaaggcttcgcctctcccttaaccggcatcgcagacgccagccagtcctccatgcacaatgctctccacatctacatgaacggcaccatgagccaagtccaaggctcagccaacgacccgatcttcctactacaccacgcattcgtcgattcaatgttcgaacaatggctccgccgccaccgtccactacaagaagtctacccagaagcaaacgcccccataggccacaatcgcgaatcatacatggtccccttcatccctctctatcgaaacggcgacttctttatctcatcaaaagacctaggctacgactattcctacctacaagactccgaccctgactccttccaagactacatcaagtcctacctggaacaagcctcacgcatctggtcctggcttctcggtgcagcaatggtaggtgccgtactcaccgccctactagccggcctagtatccctattatgcagacacaaacgcaaacaactaccagaagaaaaacaaccactcctcatggaaaaggaagactaccacagcctctatcaatcacacctctga

SEQ ID NO: 4529 - RNA, 1614 nt, synthetic construct
  misc_feature 1..1614: note = AAC15468 variant
  source 1..1614: mol_type = other RNA
atgtcagccccgaaactactctccctcggctgcatattcttcccgctactactattccaacaagctagagcacaattcccccgccaatgcgccaccgtcgaagcactccgctcaggcatgtgctgccccgatctttcccccgtaagcggccccggaaccgatcgatgcggctcttccagcggccgagggcgctgcgaagccgtcaccgctgacagccgaccacactctccccaatacccccacgacggccgcgacgaccgcgaagtatggcccctcagattcttcaaccgcacatgccattgcaacggcaacttctcaggccacaactgcggcacctgccgccccggctggcgcggcgccgcatgcgaccaaagagtccttatcgtacgtagaaacctcctcgacctctccaaagaagaaaaaaaccacttcgtgcgagccctcgacatggccaaacgaaccacccacccattattcgtcatcgccaccagacgctcagaagaaatccttggcccagacggcaacacaccccaattcgaaaacatatccatctacaactacttcgtatggactcactactactccgtaaaaaaaaccttcctcggagtaggtcaagaatccttcggcgaagtagacttctcccacgaaggacctgcgttccttacatggcatcgctaccacctccttcgtctcgaaaaagatatgcaagaaatgctacaagaaccatcattctcattgccctactggaacttcgccaccggcaaaaacgtctgcgatatttgcacagatgacctcatgggctcccgatccaatttcgactccaccctcatctcgcccaacagtgtcttctcccaatggcgagttgtttgcgactcactggaggactacgacaccctcggaactctctgcaactccacagaagacggacccatacgaaggaaccccgccggcaacgtcgcacgccccatggtccaacgactacccgaaccccaagatgtcgcacaatgcctcgaggtcggcctcttcgacaccccccctttttacagcaactcaaccaactcattccgtaacacagtcgaaggctactcagaccccaccggaaaatacgaccccgccgtccgatcactccacaacctcgctcacctattcctaaacgggactggaggacaaacccacctatcccccaacgaccccatcttcgtcctgctccacaccttcaccgacgccgttttcgacgaatggctgcgtcgatacaatgccgacatctccaccttccccctagaaaacgcccccataggacacaaccgccaatacaacatggtcccattctggccaccagtcaccaacaccgaaatgttcgtcaccgcacccgataacctcggctacacctacgaaatccaatggccctcccgcgaattttccgtcccagaaataatagcaatcgcagttgtcggggccctactactagtggccctcatcttcggcaccgcctcctacctcatccgcgctcgccgctccatggacgaagcaaaccaacccctcctcacagaccaatatcaatgctacgcagaagaatatgaaaaactacaaaacccaaaccaatccgtcgtctag

SEQ ID NO: 4530 - RNA, 1560 nt, synthetic construct
  misc_feature 1..1560: note = AAA20870 variant
  source 1..1560: mol_type = other RNA
atgtcacccctatggtggggcttcctcctctcttgcctaggctgtaaaatcctacccggagcccaaggccaattcccccgcgtctgcatgacagtcgactccctagtcaacaaagaatgctgcccccgactcggcgccgaatccgccaacgtctgcgggtcacaacagggacgcggacaatgcaccgaagtccgtgcagacacccgcccctggtcaggcccctacatcctccgaaaccaagacgaccgagaactctggccccgtaaattcttccacagaacatgcaaatgcaccggcaatttcgccggctacaactgcggcgactgcaaattcggatggaccggacccaactgcgaacgtaagaaaccacccgtaatccgacaaaacattcactccctctcaccccaagagcgagaacaattcctaggagccctcgacctcgccaagaaacgcgtacaccccgactacgtaataaccacccaacactggctcggtctactaggccctaacggtacccaaccccaattcgccaactgctccgtgtacgacttcttcgtctggttacactactactcagtccgtgacaccctactaggccccggccgcccctacagagccatagacttctcacaccaaggccccgccttcgtcacatggcaccgctaccacctcctatgcctagagcgcgacctccaaagactcattgggaacgagtccttcgccctcccatactggaacttcgccaccggacgaaacgaatgcgacgtctgcaccgaccaactctttggcgcagcccgccccgacgaccccacacttatctcccgtaactcacgcttctcctcctgggaaaccgtgtgcgactccctagacgactacaaccaccttgtcaccctttgcaacggcacttacgaaggtctactccgccgtaaccaaatgggccgcaactcaatgaaactcccaaccctcaaagacatccgcgactgcctctccctacaaaaattcgacaatcccccattctttcaaaactccacgttctccttccgcaacgccttagaaggcttcgataaagcagacggcacactcgactcacaggtcatgtccctccacaacctagtccactcatttctcaacggcactaacgccctaccccactccgccgcaaacgaccccatcttcgtagtcctccactcctttacagacgccatattcgacgaatggatgaaacgtttcaacccacccgccgacgcctggccacaagaactcgctccaataggccacaaccgcatgtacaacatggtaccatttttccctcccgttaccaacgaagaactattcctcacttccgaccaactcggttactcctatgccattgacctaccagtctctgtcgaagaaacccccggctggcccaccaccctcctcgtcgtaatgggaactctcgtagccttagtaggcctcttcgtccttctcgcattcctccaataccggcgcctaagaaagggctacaccccactcatggaaacccacctctcctccaaacgatacacagaagaggcttaa

SEQ ID NO: 4531 - RNA, 456 nt, synthetic construct
  misc_feature 1..456: note = CCDS7679.1 variant
  source 1..456: mol_type = other RNA
atgcgccgcctcctcctcgtcacatccctcgtagtcgtcctcctctgggaagccggcgccgtccccgcccccaaagtacccatcaaaatgcaagtcaaacactggccctccgaacaagaccccgaaaaagcctggggcgcccgcgtcgtcgaaccacccgaaaaagacgaccaactagtcgtcctcttccccgtccaaaaacccaaactcctaaccaccgaagaaaaaccccgcggccaaggccgcggccccatccttcccggcaccaaagcctggatggaaaccgaagacaccctcggccacgtactctcccccgaacccgaccacgactccctctaccaccccccccccgaagaagaccaaggcgaagaacgcccccgcctatgggtcatgcccaaccaccaagtcctactcggccccgaagaagaccaagaccacatctaccacccccaataa

SEQ ID NO: 4532 - RNA, 525 nt, synthetic construct
  misc_feature 1..525: note = ACF47598 variant
  source 1..525: mol_type = other RNA
atggtctcctactgggacaccggcgtcctcctctgcgccctcctctcttgcctcctcctcaccggctcctcctccggctcaaaactcaaagaccccgaactctccctcaaaggcacccaacacatcatgcaagccggacaaaccctacacctccaatgccgcggcgaagccgcccacaaatggtccctccccgaaatggtctcaaaagaatccgaacgtctctccatcaccaaatccgcctgcggccgaaacggcaaacaattctgctccaccctcaccctcaacacagcccaagctaaccacaccggcttctactcctgcaaatacctcgccgtccccacctccaaaaaaaaagaaaccgaatccgccatctacatcttcatctctgacaccggacgccccttcgtcgaaatgtactccgaaatccccgaaatcatccacatgaccgaaggccgcgaactagtcatcccctgccgcgtcacctcacccaacatcaccgtcaccctcaaaaaaaaaaaagcctaa

SEQ ID NO: 4533 - RNA, 750 nt, synthetic construct
  misc_feature 1..750: note = BAR92607 variant
  source 1..750: mol_type = other RNA
atgggttccgacgtccgtgacctcaacgccctcctccccgccgtcccctccctcggaggcggcggaggctgcgcactcccagtctcaggcgccgcccaatgggccccagtcctcgacttcgccccccccggcgcctccgcatacggctccctaggcggccccgccccaccccccgccccccccccccccccccctccccccccccactcattcatcaaacaagaaccatcctggggcggcgccgaaccccacgaagaacaatgcctctccgccttcacagtccacttctccggccaattcacaggcaccgccggcgcctgccgctacggcccattcggccccccccccccctcccaagcctcctccggccaagcccgcatgttccccaacgccccctacctccccagctgcctcgaatcccaacccgccatacgcaaccaaggctactccacagtcaccttcgacggaaccccctcctacggccacacaccctcccaccacgccgcccaattccccaaccactccttcaaacacgaagaccccatgggccaacaaggctccctcggcgaacaacaatactccgtcccaccacccgtctacggctgtcacacccccacagactcctgcacaggctcacaagccctcctactccgaaccccctactcatcagacaatctctaccaaatgacatcccaacttgaatgcatgacatggaatcaaatgaacctcggcgccaccctcaaaggctaa

SEQ ID NO: 4534 - RNA, 1350 nt, synthetic construct
  misc_feature 1..1350: note = AAA61299 variant
  source 1..1350: mol_type = other RNA
atgggctccgatgtccgagacctcaacgcccttctacccgccgtcccctccctcggcggcggcggcggttgcgccctccccgtctcaggcgctgcccaatgggcccccgtcctcgacttcgccccacccggcgcctcagcatacggcagtctcggaggacccgctccccctcccgccccaccgccacccccaccaccacctccccactcattcatcaaacaagaaccctcttggggaggcgccgaaccccacgaagaacaatgcctttccgctttcaccgtccacttctcaggacaattcactggaaccgcaggagcctgccgctacggcccctttggcccaccaccaccctcccaagcctcctcaggtcaggcccgtatgttccccaacgcaccctacctcccctcctgcctcgaaagtcaacccgccatacgcaaccaaggctactctaccgtcaccttcgacggcacgccctcttacggacacactccctcacatcacgcggcacaattccccaaccacagcttcaaacacgaagaccccatgggccagcaaggatcactcggcgaacaacaatactccgtaccccctcccgtctacggctgccatacccccaccgactcctgcacaggatcccaagccctccttctccgcaccccctacagctccgacaacctataccaaatgacatcccaactagaatgcatgacctggaaccaaatgaaccttggcgcaacactcaaaggcgtcgccgctggctcctcctcctccgttaaatggaccgaaggacaatccaatcactcaacaggttacgaatccgacaaccacacaacccccatcctatgcggcgctcagtaccgcatccacacacacggagtcttccgtggcatccaagacgtccgccgagtccccggcgtcgctcccaccctggtcagatctgcctcagaaacctccgaaaaacgccccttcatgtgcgcctaccccgggtgcaacaaacgctacttcaaactctcccacctccaaatgcactccagaaaacacacaggcgaaaaaccctaccaatgcgacttcaaagactgcgaacgacgattctcacgtagcgaccaactcaagcggcaccaacggcgccacaccggcgtcaaacccttccaatgcaaaacctgccaacgaaaattctcccgatccgaccacctaaaaacccacacccgaacccacaccggtaaaacatccgaaaaacccttctcctgccgctggccctcatgccaaaagaaattcgcgcgctcagacgaactcgtacgacaccacaatatgcaccaacgcaacatgaccaaactccaactcgccctctaa

SEQ ID NO: 4535 - RNA, 279 nt, synthetic construct
  misc_feature 1..279: note = AAA63269 variant
  source 1..279: mol_type = other RNA
atgcaacgccgcggccaacccctcgaaaaccacgtcgccctcatccactggcaatccgccggcatccccgcctccaaagtccacaactactgcaacatgaaaaaatcccgcctcggccgctcccgcgccgtccgcatctcccaacccctcctctccccccgccgctgccccctccacctcaccgaacgcggcgccggcctcctccaaccccaaccccaaggccccgtccgcacccccggccccccctccggctcccaccccgccgccgccgacaactaa

SEQ ID NO: 4536 - RNA, 246 nt, synthetic construct
  misc_feature 1..246: note = AAP35763 variant
  source 1..246: mol_type = other RNA
atggaatcccccaaaaaaaaaaaccaacaactcaaagtcggcatcctccacctcggctcccgccaaaaaaaaatccgcatccaactccgctcccaatgcgccacctggaaagtcatctgcaaatcctgcatctcccaaacccccggcatcaacctcgacctcggctccggcgtcaaagtcaaaatcatccccaaagaagaacactgcaaaatgcccgaagccggcgaagaacaaccccaagtctaa

SEQ ID NO: 4537 - DNA, 42 bp, synthetic construct
  misc_feature 1..42: note = 5-UTR of human ribosomal protein Large 32 lacking the 5 terminal oligopyrimidine tract
  source 1..42: mol_type = other DNA
ggcgctgcctacggaggtggcagccatctccttctcggcatc

SEQ ID NO: 4538 - RNA, 42 nt, synthetic construct
  misc_feature 1..42: note = 5-UTR of human ribosomal protein Large 32 lacking the 5 terminal oligopyrimidine tract mRNA
  source 1..42: mol_type = other RNA
ggcgctgcctacggaggtggcagccatctccttctcggcatc

SEQ ID NO: 4539 - DNA, 75 bp, synthetic construct
  misc_feature 1..75: note = 5-UTR of human mitochondrial ATP synthase subunit alpha lacking the 5 terminal oligopyrimidine tract
  source 1..75: mol_type = other DNA
gcggctcggccattttgtcccagtcagtccggaggctgcggctgcagaagtaccgcctgcggagtaactgcaaag

SEQ ID NO: 4540 - RNA, 75 nt, synthetic construct
  misc_feature 1..75: note = 5-UTR of human mitochondrial ATP synthase subunit alpha lacking the 5 terminal oligopyrimidine tract mRNA
  source 1..75: mol_type = other RNA
gcggctcggccattttgtcccagtcagtccggaggctgcggctgcagaagtaccgcctgcggagtaactgcaaag

SEQ ID NO: 4541 - DNA, 110 bp, synthetic construct
  misc_feature 1..110: note = 3-UTR of Homo sapiens hemoglobin, alpha 1 (HBA1)
  source 1..110: mol_type = other DNA
gctggagcctcggtggccatgcttcttgccccttgggcctccccccagcccctcctccccttcctgcacccgtacccccgtggtctttgaataaagtctgagtgggcggc

SEQ ID NO: 4542 - RNA, 110 nt, synthetic construct
  misc_feature 1..110: note = 3-UTR of Homo sapiens hemoglobin, alpha 1 (HBA1) mRNA
  source 1..110: mol_type = other RNA
gctggagcctcggtggccatgcttcttgccccttgggcctccccccagcccctcctccccttcctgcacccgtacccccgtggtctttgaataaagtctgagtgggcggc

SEQ ID NO: 4543 - DNA, 108 bp, synthetic construct
  misc_feature 1..108: note = 3-UTR of Homo sapiens hemoglobin, alpha 2 (HBA2)
  source 1..108: mol_type = other DNA
gctggagcctcggtagccgttcctcctgcccgctgggcctcccaacgggccctcctcccctccttgcaccggcccttcctggtctttgaataaagtctgagtgggcag

SEQ ID NO: 4544 - RNA, 108 nt, synthetic construct
  misc_feature 1..108: note = 3-UTR of Homo sapiens hemoglobin, alpha 2 (HBA2) mRNA
  source 1..108: mol_type = other RNA
gctggagcctcggtagccgttcctcctgcccgctgggcctcccaacgggccctcctcccctccttgcaccggcccttcctggtctttgaataaagtctgagtgggcag

SEQ ID NO: 4545 - DNA, 132 bp, synthetic construct
  misc_feature 1..132: note = 3-UTR of Homo sapiens hemoglobin, beta (HBB)
  source 1..132: mol_type = other DNA
gctcgctttcttgctgtccaatttctattaaaggttcctttgttccctaagtccaactactaaactgggggatattatgaagggccttgagcatctggattctgcctaataaaaaacatttattttcattgc

SEQ ID NO: 4546 - RNA, 132 nt, synthetic construct
  misc_feature 1..132: note = 3-UTR of Homo sapiens hemoglobin, beta (HBB) mRNA
  source 1..132: mol_type = other RNA
gctcgctttcttgctgtccaatttctattaaaggttcctttgttccctaagtccaactactaaactgggggatattatgaagggccttgagcatctggattctgcctaataaaaaacatttattttcattgc

SEQ ID NO: 4547 - DNA, 44 bp, synthetic construct
  misc_feature 1..44: note = Center, alpha-complex-binding portion of the 3UTR of an alpha-globin gene (muag)
  source 1..44: mol_type = other DNA
gcccgatgggcctcccaacgggccctcctcccctccttgcaccg

SEQ ID NO: 4548 - RNA, 44 nt, synthetic construct
  misc_feature 1..44: note = Center, alpha-complex-binding portion of the 3UTR of an alpha-globin gene (muag) mRNA
  source 1..44: mol_type = other RNA
gcccgatgggcctcccaacgggccctcctcccctccttgcaccg

SEQ ID NO: 4549 - DNA, 186 bp, synthetic construct
  misc_feature 1..186: note = 3-UTR of human albumin
  source 1..186: mol_type = other DNA
catcacatttaaaagcatctcagcctaccatgagaataagagaaagaaaatgaagatcaaaagcttattcatctgtttttctttttcgttggtgtaaagccaacaccctgtctaaaaaacataaatttctttaatcattttgcctcttttctctgtgcttcaattaataaaaaatggaaagaatct

SEQ ID NO: 4550 - RNA, 186 nt, synthetic construct
  misc_feature 1..186: note = 3-UTR of human albumin mRNA
  source 1..186: mol_type = other RNA
catcacatttaaaagcatctcagcctaccatgagaataagagaaagaaaatgaagatcaaaagcttattcatctgtttttctttttcgttggtgtaaagccaacaccctgtctaaaaaacataaatttctttaatcattttgcctcttttctctgtgcttcaattaataaaaaatggaaagaatct

SEQ ID NO: 4551 - DNA, 186 bp, synthetic construct
  misc_feature 1..186: note = 3-UTR albumin7
  source 1..186: mol_type = other DNA
catcacatttaaaagcatctcagcctaccatgagaataagagaaagaaaatgaagatcaatagcttattcatctctttttctttttcgttggtgtaaagccaacaccctgtctaaaaaacataaatttctttaatcattttgcctcttttctctgtgcttcaattaataaaaaatggaaagaacct

SEQ ID NO: 4552 - RNA, 186 nt, synthetic construct
  misc_feature 1..186: note = 3-UTR albumin7 mRNA
  source 1..186: mol_type = other RNA
catcacatttaaaagcatctcagcctaccatgagaataagagaaagaaaatgaagatcaatagcttattcatctctttttctttttcgttggtgtaaagccaacaccctgtctaaaaaacataaatttctttaatcattttgcctcttttctctgtgcttcaattaataaaaaatggaaagaacct

SEQ ID NO: 4553 - DNA, 187 bp, synthetic construct
  misc_feature 1..187: note = 3-UTR ALB7
  source 1..187: mol_type = other DNA
gcatcacatttaaaagcatctcagcctaccatgagaataagagaaagaaaatgaagatcaatagcttattcatctctttttctttttcgttggtgtaaagccaacaccctgtctaaaaaacataaatttctttaatcattttgcctcttttctctgtgcttcaattaataaaaaatggaaagaacct

SEQ ID NO: 4554 - RNA, 187 nt, synthetic construct
  misc_feature 1..187: note = 3-UTR ALB7 mRNA
  source 1..187: mol_type = other RNA
gcatcacatttaaaagcatctcagcctaccatgagaataagagaaagaaaatgaagatcaatagcttattcatctctttttctttttcgttggtgtaaagccaacaccctgtctaaaaaacataaatttctttaatcattttgcctcttttctctgtgcttcaattaataaaaaatggaaagaacct

SEQ ID NO: 4555 - DNA, 24 bp, synthetic construct
  misc_feature 1..24: note = histone stem-loop sequence
  source 1..24: mol_type = other DNA
caaaggctcttttcagagccacca

SEQ ID NO: 4556 - RNA, 24 nt, synthetic construct
  misc_feature 1..24: note = histone stem-loop sequence mRNA
  source 1..24: mol_type = other RNA
caaaggctcttttcagagccacca

SEQ ID NO: 4557 - DNA, 13 bp, synthetic construct
  misc_feature 1..13: note = Kozak
  source 1..13: mol_type = other DNA
gccgccaccatgg

SEQ ID NO: 4558 - protein, 261 aa, synthetic construct
  REGION 1..261: note = P07288-1
MWVPVVFLTLSVTWIGAAPLILSRIVGGWECEKHSQPWQVLVASRGRAVCGGVLVHPQWVLTAAHCIRNKSVILLGRHSLFHPEDTGQVFQVSHSFPHPLYDMSLLKNRFLRPGDDSSHDLMLLRLSEPAELTDAVKVMDLPTQEPALGTTCYASGWGSIEPEEFLTPKKLQCVDLHVISNDVCAQVHPQKVTKFMLCAGRWTGGKSTCSGDSGGPLVCNGVLQGITSWGSEPCALPERPSLYTKVVHYRKWIKDTIVANP

SEQ ID NO: 4559 - protein, 238 aa, synthetic construct
  REGION 1..238: note = P07288-2
MWVPVVFLTLSVTWIGAAPLILSRIVGGWECEKHSQPWQVLVASRGRAVCGGVLVHPQWVLTAAHCIRNKSVILLGRHSLFHPEDTGQVFQVSHSFPHPLYDMSLLKNRFLRPGDDSSHDLMLLRLSEPAELTDAVKVMDLPTQEPALGTTCYASGWGSIEPEEFLTPKKLQCVDLHVISNDVCAQVHPQKVTKFMLCAGRWTGGKSTCSWVILITELTMPALPMVLHGSLVPWRGGV

SEQ ID NO: 4560 - protein, 218 aa, synthetic construct
  REGION 1..218: note = P07288-3
MWVPVVFLTLSVTWIGAAPLILSRIVGGWECEKHSQPWQVLVASRGRAVCGGVLVHPQWVLTAAHCIRKPGDDSSHDLMLLRLSEPAELTDAVKVMDLPTQEPALGTTCYASGWGSIEPEEFLTPKKLQCVDLHVISNDVCAQVHPQKVTKFMLCAGRWTGGKSTCSGDSGGPLVCNGVLQGITSWGSEPCALPERPSLYTKVVHYRKWIKDTIVANP

SEQ ID NO: 4561 - RNA, 786 nt, synthetic construct
  misc_feature 1..786: note = P07288-1
  source 1..786: mol_type = other RNA
atgtgggtcccggttgtcttcctcaccctgtccgtgacgtggattggtgctgcacccctcatcctgtctcggattgtgggaggctgggagtgcgagaagcattcccaaccctggcaggtgcttgtggcctctcgtggcagggcagtctgcggcggtgttctggtgcacccccagtgggtcctcacagctgcccactgcatcaggaacaaaagcgtgatcttgctgggtcggcacagcctgtttcatcctgaagacacaggccaggtatttcaggtcagccacagcttcccacacccgctctacgatatgagcctcctgaagaatcgattcctcaggccaggtgatgactccagccacgacctcatgctgctccgcctgtcagagcctgccgagctcacggatgctgtgaaggtcatggacctgcccacccaggagccagcactggggaccacctgctacgcctcaggctggggcagcattgaaccagaggagttcttgaccccaaagaaacttcagtgtgtggacctccatgttatttccaatgacgtgtgtgcgcaagttcaccctcagaaggtgaccaagttcatgctgtgtgctggacgctggacagggggcaaaagcacctgctcgggtgattctgggggcccacttgtctgtaatggtgtgcttcaaggtatcacgtcatggggcagtgaaccatgtgccctgcccgaaaggccttccctgtacaccaaggtggtgcattaccggaagtggatcaaggacaccatcgtggccaacccctga

SEQ ID NO: 4562 - RNA, 717 nt, synthetic construct
  misc_feature 1..717: note = P07288-2
  source 1..717: mol_type = other RNA
atgtgggtcccggttgtcttcctcaccctgtccgtgacgtggattggtgctgcacccctcatcctgtctcggattgtgggaggctgggagtgcgagaagcattcccaaccctggcaggtgcttgtggcctctcgtggcagggcagtctgcggcggtgttctggtgcacccccagtgggtcctcacagctgcccactgcatcaggaacaaaagcgtgatcttgctgggtcggcacagcctgtttcatcctgaagacacaggccaggtatttcaggtcagccacagcttcccacacccgctctacgatatgagcctcctgaagaatcgattcctcaggccaggtgatgactccagccacgacctcatgctgctccgcctgtcagagcctgccgagctcacggatgctgtgaaggtcatggacctgcccacccaggagccagcactggggaccacctgctacgcctcaggctggggcagcattgaaccagaggagttcttgaccccaaagaaacttcagtgtgtggacctccatgttatttccaatgacgtgtgtgcgcaagttcaccctcagaaggtgaccaagttcatgctgtgtgctggacgctggacagggggcaaaagcacctgctcgtgggtcattctgatcaccgaactgaccatgccagccctgccgatggtcctccatggctccctagtgccctggagaggaggtgtctag

SEQ ID NO: 4563 - RNA, 657 nt, synthetic construct
  misc_feature 1..657: note = P07288-3
  source 1..657: mol_type = other RNA
atgtgggtcccggttgtcttcctcaccctgtccgtgacgtggattggtgctgcacccctcatcctgtctcggattgtgggaggctgggagtgcgagaagcattcccaaccctggcaggtgcttgtggcctctcgtggcagggcagtctgcggcggtgttctggtgcacccccagtgggtcctcacagctgcccactgcatcaggaagccaggtgatgactccagccacgacctcatgctgctccgcctgtcagagcctgccgagctcacggatgctgtgaaggtcatggacctgcccacccaggagccagcactggggaccacctgctacgcctcaggctggggcagcattgaaccagaggagttcttgaccccaaagaaacttcagtgtgtggacctccatgttatttccaatgacgtgtgtgcgcaagttcaccctcagaaggtgaccaagttcatgctgtgtgctggacgctggacagggggcaaaagcacctgctcgggtgattctgggggcccacttgtctgtaatggtgtgcttcaaggtatcacgtcatggggcagtgaaccatgtgccctgcccgaaaggccttccctgtacaccaaggtggtgcattaccggaagtggatcaaggacaccatcgtggccaacccctga

SEQ ID NO: 4564 - RNA, 786 nt, synthetic construct
  misc_feature 1..786: note = P07288-1 variant
  source 1..786: mol_type = other RNA
atgtgggtgcccgtcgtgttcctgaccctcagcgtgacctggatcggcgccgccccgctgatcctgtcccgcatcgtcgggggctgggagtgcgagaagcacagccagccctggcaggtcctcgtggcgtcccgggggcgcgccgtgtgcggcggggtgctggtgcacccccagtgggtcctgacggccgcccactgcatccggaacaagagcgtgatcctcctgggccgccactccctgttccaccccgaggacaccggccaggtgttccaggtcagccactccttcccgcaccccctctacgacatgagcctgctgaagaaccggttcctccgccccggggacgactccagccacgacctgatgctgctccggctgtccgagcccgccgagctgaccgacgcggtgaaggtgatggacctcccgacccaggagcccgccctgggcacgacctgctacgccagcgggtggggctccatcgagcccgaggagttcctgacccccaagaagctccagtgcgtcgacctgcacgtgatcagcaacgacgtgtgcgcccaggtccacccgcagaaggtgaccaagttcatgctgtgcgcggggcgctggacgggcggcaagtccacgtgcagcggggactccggcgggcccctcgtgtgcaacggcgtcctgcagggcatcaccagctgggggtccgagccctgcgccctgcccgagcggccgagcctctacaccaaggtggtgcactaccgcaagtggatcaaggacaccatcgtcgccaacccctga

SEQ ID NO: 4565 - RNA, 717 nt, synthetic construct
  misc_feature 1..717: note = P07288-2 variant
  source 1..717: mol_type = other RNA
atgtgggtgcccgtcgtgttcctgaccctcagcgtgacctggatcggcgccgccccgctgatcctgtcccgcatcgtcgggggctgggagtgcgagaagcacagccagccctggcaggtcctcgtggcgtcccgggggcgcgccgtgtgcggcggggtgctggtgcacccccagtgggtcctgaccgccgcccactgcatccggaacaagagcgtgatcctcctgggccgccactccctgttccaccccgaggacaccggccaggtgttccaggtcagccactccttcccgcaccccctctacgacatgagcctgctgaagaaccggttcctccgccccggggacgactccagccacgacctgatgctgctccggctgtccgagcccgccgagctgaccgacgcggtgaaggtgatggacctcccgacccaggagcccgccctgggcacgacctgctacgccagcgggtggggctccatcgagcccgaggagttcctgacccccaagaagctccagtgcgtcgacctgcacgtgatcagcaacgacgtgtgcgcccaggtccacccgcagaaggtgaccaagttcatgctgtgcgcggggcgctggacgggcggcaagtccacgtgcagctgggtgatcctcatcaccgagctgaccatgcccgccctgcccatggtcctccacgggtccctggtgccctggcggggcggggtgtga

SEQ ID NO: 4566 - RNA, 657 nt, synthetic construct
  misc_feature 1..657: note = P07288-3 variant
  source 1..657: mol_type = other RNA
atgtgggtgcccgtcgtgttcctgaccctcagcgtgacctggatcggcgccgccccgctgatcctgtcccgcatcgtcgggggctgggagtgcgagaagcacagccagccctggcaggtcctcgtggcgtcccgggggcgcgccgtgtgcggcggggtgctggtgcacccccagtgggtcctgacggccgcccactgcatccggaagcccggcgacgacagctcccacgacctcatgctgctgcgcctcagcgagccggccgagctgaccgacgcggtgaaggtgatggacctgcccacccaggagcccgccctcggcaccacgtgctacgcctccgggtggggcagcatcgagcccgaggagttcctgaccccgaagaagctgcagtgcgtcgacctccacgtgatctccaacgacgtgtgcgcccaggtccacccccagaaggtgaccaagttcatgctgtgcgcggggcggtggaccggcggcaagagcacgtgctccggggacagcggcgggcccctggtgtgcaacggcgtcctccaggggatcacctcctggggcagcgagccctgcgccctgccggagcgcccctccctgtacaccaaggtggtgcactaccggaagtggatcaaggacaccatcgtcgccaacccctga

SEQ ID NO: 4567 - RNA, 786 nt, synthetic construct
  misc_feature 1..786: note = P07288-1 variant
  source 1..786: mol_type = other RNA
atgtgggtccccgtcgtcttcctcaccctctccgtcacctggatcggcgccgcccccctcatcctctcccgcatcgtcggcggctgggagtgcgagaagcactcccagccctggcaggtcctcgtcgcctcccgcggccgcgccgtctgcggcggcgtcctcgtccacccccagtgggtcctcaccgccgcccactgcatccgcaacaagtccgtcatcctcctcggccgccactccctcttccaccccgaggacaccggccaggtcttccaggtctcccactccttcccccaccccctctacgacatgtccctcctcaagaaccgcttcctccgccccggcgacgactcctcccacgacctcatgctcctccgcctctccgagcccgccgagctcaccgacgccgtcaaggtcatggacctccccacccaggagcccgccctcggcaccacctgctacgcctccggctggggctccatcgagcccgaggagttcctcacccccaagaagctccagtgcgtcgacctccacgtcatctccaacgacgtctgcgcccaggtccacccccagaaggtcaccaagttcatgctctgcgccggccgctggaccggcggcaagtccacctgctccggcgactccggcggccccctcgtctgcaacggcgtcctccagggcatcacctcctggggctccgagccctgcgccctccccgagcgcccctccctctacaccaaggtcgtccactaccgcaagtggatcaaggacaccatcgtcgccaacccctga

SEQ ID NO: 4568 - RNA, 717 nt, synthetic construct
  misc_feature 1..717: note = P07288-2 variant
  source 1..717: mol_type = other RNA
atgtgggtccccgtcgtcttcctcaccctctccgtcacctggatcggcgccgcccccctcatcctctcccgcatcgtcggcggctgggagtgcgagaagcactcccagccctggcaggtcctcgtcgcctcccgcggccgcgccgtctgcggcggcgtcctcgtccacccccagtgggtcctcaccgccgcccactgcatccgcaacaagtccgtcatcctcctcggccgccactccctcttccaccccgaggacaccggccaggtcttccaggtctcccactccttcccccaccccctctacgacatgtccctcctcaagaaccgcttcctccgccccggcgacgactcctcccacgacctcatgctcctccgcctctccgagcccgccgagctcaccgacgccgtcaaggtcatggacctccccacccaggagcccgccctcggcaccacctgctacgcctccggctggggctccatcgagcccgaggagttcctcacccccaagaagctccagtgcgtcgacctccacgtcatctccaacgacgtctgcgcccaggtccacccccagaaggtcaccaagttcatgctctgcgccggccgctggaccggcggcaagtccacctgctcctgggtcatcctcatcaccgagctcaccatgcccgccctccccatggtcctccacggctccctcgtcccctggcgcggcggcgtctga

SEQ ID NO: 4569 - RNA, 657 nt, synthetic construct
  misc_feature 1..657: note = P07288-3 variant
  source 1..657: mol_type = other RNA
atgtgggtccccgtcgtcttcctcaccctctccgtcacctggatcggcgccgcccccctcatcctctcccgcatcgtcggcggctgggagtgcgagaagcactcccagccctggcaggtcctcgtcgcctcccgcggccgcgccgtctgcggcggcgtcctcgtccacccccagtgggtcctcaccgccgcccactgcatccgcaagcccggcgacgactcctcccacgacctcatgctcctccgcctctccgagcccgccgagctcaccgacgccgtcaaggtcatggacctccccacccaggagcccgccctcggcaccacctgctacgcctccggctggggctccatcgagcccgaggagttcctcacccccaagaagctccagtgcgtcgacctccacgtcatctccaacgacgtctgcgcccaggtccacccccagaaggtcaccaagttcatgctctgcgccggccgctggaccggcggcaagtccacctgctccggcgactccggcggccccctcgtctgcaacggcgtcctccagggcatcacctcctggggctccgagccctgcgccctccccgagcgcccctccctctacaccaaggtcgtccactaccgcaagtggatcaaggacaccatcgtcgccaacccctga

SEQ ID NO: 4570 - RNA, 786 nt, synthetic construct
  misc_feature 1..786: note = P07288-1 variant
  source 1..786: mol_type = other RNA
atgtgggtgcccgtcgttttcctgaccctcagcgtgacatggatcggcgccgctcctcttattctgtccagaatagtagggggatgggagtgcgaaaagcactctcagccatggcaagtgttggtcgcatcaaggggtcgggccgtgtgtggcggggttttagtgcatccgcagtgggtcctgactgcggctcactgcatccgcaacaaaagtgtgattctactcggacgacatagcctgtttcaccccgaggacacgggccaggtattccaggtttcccattcttttcctcacccactttacgatatgtcgctgttgaagaatcgtttcctcagacccggtgacgattcaagccacgacctgatgctgctcaggttaagtgaacctgccgagctgaccgatgcagtgaaagtcatggaccttccaacacaagaacccgccttggggactacctgttatgcttccggatggggctctatcgagcctgaggaatttctgacaccaaagaaactacagtgcgtggatctccatgtgattagcaacgacgtctgtgcacaggttcacccgcagaaggtgaccaagttcatgctgtgcgccggccggtggactgggggaaaatccacatgttcaggtgatagtggcgggccccttgtatgcaatggagtgctgcaaggcatcaccagctggggttctgagccttgtgctttgccagaacgcccctccctctacacgaaggtcgtgcattatagaaaatggataaaggacactatcgttgccaacccttga

SEQ ID NO: 4571 - RNA, 717 nt, synthetic construct
  misc_feature 1..717: note = P07288-2 variant
  source 1..717: mol_type = other RNA
atgtgggtgcccgtcgttttcctgaccctcagcgtgacatggatcggcgccgctcctcttattctgtccagaatagtagggggatgggagtgcgaaaagcactctcagccatggcaagtgttggtcgcatcaaggggtcgggccgtgtgtggcggggttttagtgcatccgcagtgggtcctgactgcggctcactgcatccgcaacaaaagtgtgattctactcggacgacatagcctgtttcaccccgaggacacgggccaggtattccaggtttcccattcttttcctcacccactttacgatatgtcgctgttgaagaatcgtttcctcagacccggtgacgattcaagccacgacctgatgctgctcaggttaagtgaacctgccgagctgaccgatgcagtgaaagtcatggaccttccaacacaagaacccgccttggggactacctgttatgcttccggatggggctctatcgagcctgaggaatttctgacaccaaagaaactacagtgcgtggatctccatgtgattagcaacgacgtctgtgcacaggttcacccgcagaaggtgaccaagttcatgctgtgcgccggccggtggactgggggaaaatccacatgttcatgggtaatccttataaccgagctgacgatgcccgctttgcctatggtgctccatggtagtctggtcccatggcgcggcggggtgtga

SEQ ID NO: 4572 - RNA, 657 nt, synthetic construct
  misc_feature 1..657: note = P07288-3 variant
  source 1..657: mol_type = other RNA
atgtgggtgcccgtcgttttcctgaccctcagcgtgacatggatcggcgccgctcctcttattctgtccagaatagtagggggatgggagtgcgaaaagcactctcagccatggcaagtgttggtcgcatcaaggggtcgggccgtgtgtggcggggttttagtgcatccgcagtgggtcctgactgcggctcactgcatccgcaaacccggagacgatagtagccatgacctaatgctcctgcgactttccgagcctgccgaactgacggatgcagtgaaggtaatggacttgccaacccaggagcccgccctcggcacaacttgttacgcttctggttgggggtcgattgaacctgaggagtttctgacccccaaaaagctgcagtgcgttgatctccacgtgatctcaaacgacgtctgtgcacaagtgcatccacagaaagtgacaaagttcatgttatgcgccggacgttggaccggcggcaagagcacttgtagtggggattccggaggtcctctggtctgcaatggcgttcttcaggggattacatcttggggaagcgaaccatgtgctttgccggagagaccctccctgtataccaaagtggtacactacaggaagtggatcaaagacacgatagtggccaacccttga

SEQ ID NO: 4573 - RNA, 786 nt, synthetic construct
  misc_feature 1..786: note = P07288-1 variant
  source 1..786: mol_type = other RNA
atgtgggtgcccgtggtgttcctgaccctgagcgtgacctggatcggcgccgcccccctgatcctgagcagaatcgtgggcggctgggagtgcgagaagcacagccagccctggcaggtgctggtggccagcagaggcagagccgtgtgcggcggcgtgctggtgcacccccagtgggtgctgaccgccgcccactgcatcagaaacaagagcgtgatcctgctgggcagacacagcctgttccaccccgaggacaccggccaggtgttccaggtgagccacagcttcccccaccccctgtacgacatgagcctgctgaagaacagattcctgagacccggcgacgacagcagccacgacctgatgctgctgagactgagcgagcccgccgagctgaccgacgccgtgaaggtgatggacctgcccacccaggagcccgccctgggcaccacctgctacgccagcggctggggcagcatcgagcccgaggagttcctgacccccaagaagctgcagtgcgtggacctgcacgtgatcagcaacgacgtgtgcgcccaggtgcacccccagaaggtgaccaagttcatgctgtgcgccggcagatggaccggcggcaagagcacctgcagcggcgacagcggcggccccctggtgtgcaacggcgtgctgcagggcatcaccagctggggcagcgagccctgcgccctgcccgagagacccagcctgtacaccaaggtggtgcactacagaaagtggatcaaggacaccatcgtggccaacccctga

SEQ ID NO: 4574 - RNA, 717 nt, synthetic construct
  misc_feature 1..717: note = P07288-2 variant
  source 1..717: mol_type = other RNA
atgtgggtgcccgtggtgttcctgaccctgagcgtgacctggatcggcgccgcccccctgatcctgagcagaatcgtgggcggctgggagtgcgagaagcacagccagccctggcaggtgctggtggccagcagaggcagagccgtgtgcggcggcgtgctggtgcacccccagtgggtgctgaccgccgcccactgcatcagaaacaagagcgtgatcctgctgggcagacacagcctgttccaccccgaggacaccggccaggtgttccaggtgagccacagcttcccccaccccctgtacgacatgagcctgctgaagaacagattcctgagacccggcgacgacagcagccacgacctgatgctgctgagactgagcgagcccgccgagctgaccgacgccgtgaaggtgatggacctgcccacccaggagcccgccctgggcaccacctgctacgccagcggctggggcagcatcgagcccgaggagttcctgacccccaagaagctgcagtgcgtggacctgcacgtgatcagcaacgacgtgtgcgcccaggtgcacccccagaaggtgaccaagttcatgctgtgcgccggcagatggaccggcggcaagagcacctgcagctgggtgatcctgatcaccgagctgaccatgcccgccctgcccatggtgctgcacggcagcctggtgccctggagaggcggcgtgtga

SEQ ID NO: 4575 - RNA, 657 nt, synthetic construct
  misc_feature 1..657: note = P07288-3 variant
  source 1..657: mol_type = other RNA
atgtgggtgcccgtggtgttcctgaccctgagcgtgacctggatcggcgccgcccccctgatcctgagcagaatcgtgggcggctgggagtgcgagaagcacagccagccctggcaggtgctggtggccagcagaggcagagccgtgtgcggcggcgtgctggtgcacccccagtgggtgctgaccgccgcccactgcatcagaaagcccggcgacgacagcagccacgacctgatgctgctgagactgagcgagcccgccgagctgaccgacgccgtgaaggtgatggacctgcccacccaggagcccgccctgggcaccacctgctacgccagcggctggggcagcatcgagcccgaggagttcctgacccccaagaagctgcagtgcgtggacctgcacgtgatcagcaacgacgtgtgcgcccaggtgcacccccagaaggtgaccaagttcatgctgtgcgccggcagatggaccggcggcaagagcacctgcagcggcgacagcggcggccccctggtgtgcaacggcgtgctgcagggcatcaccagctggggcagcgagccctgcgccctgcccgagagacccagcctgtacaccaaggtggtgcactacagaaagtggatcaaggacaccatcgtggccaacccctga

SEQ ID NO: 4576 - RNA, 786 nt, synthetic construct
  misc_feature 1..786: note = P07288-1 variant
  source 1..786: mol_type = other RNA
atgtgggtgcccgtcgttttcctgaccctcagcgtgacatggatcggcgccgctcctctgattctttccagaatcgtcgggggatgggagtgcgaaaagcactctcagccgtggcaagtgctggtggccagccggggccgcgcggtttgtgggggagtgctcgtccatccccagtgggtgctgacggctgcccactgcattagaaacaaatccgttatccttctgggccggcattctctctttcaccctgaggacaccggacaggtgttccaggtcagccattcctttccccaccctctgtacgatatgtctctgctcaagaatcgcttcctgagacccggggacgatagctcccacgaccttatgctgctccggctgagcgaacctgccgagcttacagatgctgtgaaagtgatggacctgccgacccaagaacccgccctcggcacaacctgttatgcttctggctgggggtccattgagcctgaggaatttctgacacccaagaaactgcagtgcgtcgatctccatgttatcagcaacgacgtgtgtgcccaggtgcaccctcagaaggtcaccaagttcatgctgtgcgcgggacgctggacgggcgggaaatctacctgttccggagatagcggcgggccccttgtgtgcaatggagttctgcaaggcatcacatcttggggctccgagccgtgtgccctccctgaaagacccagcctgtacaccaaggtggtccattatcggaaatggattaaggacacaatcgtggctaacccttga

SEQ ID NO: 4577 - RNA, 717 nt, synthetic construct
  misc_feature 1..717: note = P07288-2 variant
  source 1..717: mol_type = other RNA
atgtgggtgcccgtcgttttcctgaccctcagcgtgacatggatcggcgccgctcctctgattctttccagaatcgtcgggggatgggagtgcgaaaagcactctcagccgtggcaagtgctggtggccagccggggccgcgcggtttgtgggggagtgctcgtccatccccagtgggtgctgacggctgcccactgcattagaaacaaatccgttatccttctgggccggcattctctctttcaccctgaggacaccggacaggtgttccaggtcagccattcctttccccaccctctgtacgatatgtctctgctcaagaatcgcttcctgagacccggggacgatagctcccacgaccttatgctgctccggctgagcgaacctgccgagcttacagatgctgtgaaagtgatggacctgccgacccaagaacccgccctcggcacaacctgttatgcttctggctgggggtccattgagcctgaggaatttctgacacccaagaaactgcagtgcgtcgatctccatgttatcagcaacgacgtgtgtgcccaggtgcaccctcagaaggtcaccaagttcatgctgtgcgcgggacgctggacgggcgggaaatctacctgttcctgggtgatccttattacagagctgaccatgcccgccctcccgatggttctgcatggaagccttgtgccttggagaggcggggtctga

SEQ ID NO: 4578 - RNA, 657 nt, synthetic construct
  misc_feature 1..657: note = P07288-3 variant
  source 1..657: mol_type = other RNA
atgtgggtgcccgtcgttttcctgaccctcagcgtgacatggatcggcgccgctcctctgattctttccagaatcgtcgggggatgggagtgcgaaaagcactctcagccgtggcaagtgctggtggccagccggggccgcgcggtttgtgggggagtgctcgtccatccccagtgggtgctgacggctgcccactgcattagaaaacctggcgacgattcctctcatgaccttatgctgctccggctgagcgagcccgccgaactgaccgatgctgttaaggtgatggacctccctacacaggagcccgccctggggaccacatgttacgcttccggatggggctctatcgaacctgaggagtttcttaccccgaaaaagctgcagtgcgtcgatctccacgtgattagcaacgacgtgtgtgcccaagtccatccccagaaagttacaaagttcatgctgtgcgcgggccgctggaccgggggaaagtccacgtgtagcggcgattctgggggacctcttgtgtgcaatggcgtgctgcaggggatcacctcctggggaagcgaaccctgtgccctccctgagagaccctctctgtatacaaaagtcgtgcactaccggaagtggatcaaagacaccattgttgctaacccgtga

SEQ ID NO: 4579 - RNA, 786 nt, synthetic construct
  misc_feature 1..786: note = P07288-1 variant
  source 1..786: mol_type = other RNA
atgtgggtaccagttgtattcttaacactatcagtaacatggataggagcagcacccttaatcttatcaagaatcgtaggcggatgggaatgtgaaaaacattcacaaccatggcaagtattagtagcatcacgaggaagagcagtatgtggaggagtattagttcatccacaatgggtactaacagcagcacattgtataagaaacaaatcagtaatattactaggaagacactcattattccatccagaagatacaggacaagtatttcaagtatcacatagctttccacatcctttatacgatatgtcactattaaaaaatagatttctaagaccaggagacgattcatcacacgatttaatgttattaaggttatcagaaccagcagaattaacagacgccgtaaaagtaatggatttaccaacacaagaaccagcattaggtacaacatgttacgcatcaggatggggatcaatagaaccagaagaattcctcacaccaaaaaaactacaatgcgtagacttacacgtaatatcaaacgatgtatgtgcacaagtacatccacaaaaagtaacaaaattcatgttatgtgcaggaagatggactggaggaaaatcaacatgctcaggagattctggaggtccactagtatgcaatggagtattacaaggaataacatcatggggatcagaaccatgtgcactaccagaaagaccatcattatatacaaaagtagtacattatcgaaaatggatcaaagacacaatagttgcaaatccataa

SEQ ID NO: 4580 - RNA, 717 nt, synthetic construct
  misc_feature 1..717: note = P07288-2 variant
  source 1..717: mol_type = other RNA
atgtgggtaccagtagtattccttaccttatctgtaacatggataggagcagcaccattaatattatcaagaatagtaggaggatgggaatgcgaaaaacattcacaaccatggcaagtactagtagcatcaagaggaagagcagtatgcggaggagtattagtacatccacaatgggtactaacagcagcacactgtataagaaataaaagcgtaatattactcggaagacactcattatttcatccagaagacacaggacaagtatttcaagtatcacattcatttccacatccattatacgatatgtcactattaaaaaatagatttttaagaccaggtgacgatagctcacatgatctaatgctattaagattatcagaaccagcagaattaacagatgcagtaaaagtaatggatttaccaacacaagaaccagcattaggaacaacatgttatgcaagtggttggggaagcatagaaccagaagaattcttaacaccaaaaaaactacaatgcgtagacttacacgtaatatcaaacgatgtatgcgcacaagtacatccacaaaaagtaacaaaattcatgctatgcgcaggacgctggacaggaggaaaatcaacatgtagttgggtaatattaataacagaattaacaatgccagcattaccaatggtactacacggctcactagtaccatggagaggaggagtataa

SEQ ID NO: 4581 - RNA, 657 nt, synthetic construct
  misc_feature 1..657: note = P07288-3 variant
  source 1..657: mol_type = other RNA
atgtgggtaccagtagtatttttaacattatcagtaacatggataggagcagcaccattaatactatcaagaatagtaggaggatgggaatgtgaaaaacactcacaaccatggcaagtattagtagcaagcagaggtagagcagtatgcggaggagtattagtacatccacaatgggtcttaactgcagctcattgtataagaaaaccaggagacgatagtagtcatgatttaatgttattaagattaagtgaaccagcagaactaacagatgcagtaaaagtaatggatttaccaacacaagaaccagcattaggaacaacatgttatgcatcaggatggggaagtatagaaccagaagaattcttaacaccaaaaaaactacaatgtgtagatttacatgtaataagtaatgatgtatgtgcacaagtacatccacaaaaagtaacaaaatttatgctatgtgcaggacgatggacaggaggcaaaagtacatgttcgggtgatagtggaggaccattagtatgtaatggtgtattacaaggaataacatcatggggatctgaaccatgtgctttaccagaaagaccaagtttatatacaaaagtagtacattatagaaaatggataaaagatacaatagtagcaaatccataa

SEQ ID NO: 4582 - RNA, 786 nt, synthetic construct
  misc_feature 1..786: note = P07288-1 variant
  source 1..786: mol_type = other RNA
atgtgggtccccgtcgtcttcctcaccctctctgtcacatggatcggcgccgcccccctcatactctccagaatcgtcggcggctgggaatgcgaaaaacattcccaaccctggcaagtactcgtcgcatcccgcggccgcgccgtctgcggcggcgtcctagtccacccccaatgggtcctcaccgccgcccactgcatccgaaacaaatccgtcatcctactaggccgccactccctattccaccccgaagatacaggacaagtcttccaagtctcccactccttcccccaccccctatacgacatgtccctactaaaaaaccgcttcctacgccccggcgacgactcctcacacgacctcatgctcctccgcctctcagaacccgccgaactcaccgacgccgtcaaagtaatggacctccccacccaagaacccgcactaggaaccacctgctacgcctccggctggggatccatcgaacccgaagaattcctcaccccaaaaaaactacaatgcgtagacctacacgtcatatccaacgacgtctgcgcccaagtccacccccaaaaagtcaccaaattcatgctctgcgccggccgatggaccggcggcaaatccacctgctcaggagactccggcggccccctcgtctgcaacggagtcctacaaggcatcacctcctggggctccgaaccctgcgccctccccgaacgcccatccctctacaccaaagtcgtccactaccgcaaatggatcaaagacacaatagtcgccaacccctaa

SEQ ID NO: 4583 - RNA, 717 nt, synthetic construct
  misc_feature 1..717: note = P07288-2 variant
  source 1..717: mol_type = other RNA
atgtgggtcccagtcgtcttcctaaccctctcagtaacctggataggcgccgcccccctcatcctatcccgcatcgtaggcggctgggaatgcgaaaaacactcccaaccctggcaagtcctcgtcgcatcccgaggccgcgctgtctgcggcggagtcctcgtccacccccaatgggtactcacagccgcacactgcatccgcaacaaatccgtcatcctcctcggccgccactccctcttccaccccgaagacacaggccaagtcttccaagtctcccactcattcccccaccccctatacgacatgtccctcctcaaaaaccgattcctccgccccggcgacgactcctcacacgacctcatgctactccgcctatccgaacccgccgaactcaccgacgccgtaaaagtcatggacctccccacccaagaacccgccctcggcacaacctgctacgcctccggctggggctcaatagaacccgaagaattcctcacccccaaaaaactccaatgcgtcgacctccacgtcatctccaacgacgtctgcgcccaagtccacccccaaaaagtcactaaattcatgctctgcgccggccgctggaccggcggcaaatccacctgctcctgggtaatcctaatcaccgaactaaccatgccagccttacctatggtcctccacggctcactcgtcccctggcgcggcggcgtctaa

SEQ ID NO: 4584 - RNA, 657 nt, synthetic construct
  misc_feature 1..657: note = P07288-3 variant
  source 1..657: mol_type = other RNA
atgtgggtccccgtcgtcttcctcaccctctccgtcacctggatcggcgcagcccccctcatcctctcccgcatcgtcggcggctgggaatgcgaaaaacactcccaaccatggcaagtcctcgtcgcctcccgaggccgcgccgtctgcggcggcgttctagtacacccccaatgggtcctaaccgcagcccactgcatccgcaaacccggagacgactcctcccacgacctcatgctcctacgcctatcagaacccgcagaactcaccgacgccgtcaaagtaatggacctcccaacccaagaacccgccctcggcaccacctgctacgcctccggctggggctccatcgaacccgaagaattcctaacccccaaaaaactccaatgcgtcgacctacacgtaatctcaaacgacgtctgcgcccaagtccacccccaaaaagtaaccaaattcatgctatgcgccggacgctggaccggcggaaaatcaacctgctccggcgacagcggaggccccctcgtctgcaacggcgtactccaaggcatcacctcatggggcagcgaaccctgcgccctacccgaacgcccctcactctacacaaaagtagtccactaccgcaaatggatcaaagacaccatagtagccaacccctaa

SEQ ID NO: 4585 - RNA, 1122 nt, synthetic construct
  misc_feature 1..1122: note = Q9UBF1 variant
  source 1..1122: mol_type = other RNA
atgcccccggtgcccggcgtccccttccggaacgtggacaacgacagccccacctccgtggagctggaggactgggtcgacgcccagcacccgaccgacgaggaggaggaggaggccagctccgcgagctccacgctctacctggtgttcagcccctccagcttctccaccagctccagcctgatcctcgggggccccgaggaggaggaggtgccctccggggtcatcccgaacctgaccgagagcatcccctccagccccccgcagggcccgccccaggggccctcccagagccccctgtccagctgctgcagctccttcagctggtccagcttctccgaggagagctccagccagaagggcgaggacaccggcacgtgccaggggctcccggactccgagagctccttcacctacaccctggacgagaaggtggccgagctggtggagttcctcctgctgaagtacgaggccgaggagcccgtcaccgaggccgagatgctcatgatcgtgatcaagtacaaggactacttccccgtgatcctgaagcgcgcccgggagttcatggagctgctcttcggcctggcgctgatcgaggtcgggcccgaccacttctgcgtgttcgccaacacggtgggcctcaccgacgaggggagcgacgacgagggcatgccggagaactccctgctgatcatcatcctcagcgtcatcttcatcaagggcaactgcgcctccgaggaggtgatctgggaggtgctgaacgccgtcggggtgtacgcgggccgcgagcacttcgtgtacggggagccccgggagctgctcaccaaggtctgggtgcagggccactacctggagtaccgcgaggtgccgcacagctcccccccgtactacgagttcctgtggggcccccgggcccacagcgagtccatcaagaagaaggtcctcgagttcctggccaagctgaacaacaccgtgcccagcagcttcccctcctggtacaaggacgccctcaaggacgtcgaggagcgcgtgcaggccacgatcgacaccgcggacgacgccaccgtgatggccagcgagtccctgagcgtcatgtccagcaacgtgtccttcagcgagtga

SEQ ID NO: 4586 - RNA, 543 nt, synthetic construct
  misc_feature 1..543: note = P78358 variant
  source 1..543: mol_type = other RNA
atgcaggccgagggccgcggcaccggcggctcgaccggcgacgccgacgggcccggcggcccgggcatcccggacggcccgggcgggaacgcgggcggcccgggcgaggccggcgccaccggcgggcggggcccgcggggcgccggcgccgcccgggcgagcggccccggcgggggcgccccgcggggcccgcacggcggcgccgccagcggcctgaacgggtgctgccggtgcggcgcccgcggcccggagagccggctcctggagttctacctggccatgccgttcgcgaccccgatggaggccgagctggcccggcggagcctggcccaggacgccccgccgctgcccgtgccgggcgtgctcctgaaggagttcacggtgagcggcaacatcctgaccatccggctgaccgccgcggaccaccggcagctgcagctgtcgatcagcagctgcctccagcagctgagcctgctgatgtggatcacccagtgcttcctgccggtgttcctggcccagccgcccagcggccagcgccggtga

SEQ ID NO: 4587 - RNA, 945 nt, synthetic construct
  misc_feature 1..945: note = P43357 variant
  source 1..945: mol_type = other RNA
atgcccctggagcagcgctcgcagcactgcaagccggaggagggcctcgaggcccggggcgaggccctgggcctggtgggcgcgcaggccccggccaccgaggagcaggaggccgccagcagcagcagcaccctggtggaggtgaccctgggcgaggtgccggccgcggagagcccggacccgccccagtcgccgcagggggccagcagcctgccgaccacgatgaactacccgctctggagccagagctacgaggacagctcgaaccaggaggaggagggcccgagcaccttcccggacctggagagcgagttccaggccgccctgagccggaaggtggccgagctggtccacttcctgctgctcaagtaccgggcccgggagcccgtgaccaaggcggagatgctgggcagcgtggtgggcaactggcagtacttcttcccggtgatcttcagcaaggcctcgagcagcctgcagctggtgttcggcatcgagctgatggaggtcgacccgatcggccacctgtacatcttcgccacctgcctcgggctgagctacgacggcctgctgggcgacaaccagatcatgccgaaggccggcctgctgatcatcgtgctcgccatcatcgcccgggagggcgactgcgcgccggaggagaagatctgggaggagctgagcgtgctggaggtgttcgagggccgcgaggacagcatcctgggggacccgaagaagctgctgacccagcacttcgtgcaggagaactacctcgagtaccggcaggtgcccggctcggacccggcctgctacgagttcctgtggggcccgcgggccctggtcgagaccagctacgtgaaggtgctgcaccacatggtgaagatcagcggcggcccgcacatcagctacccgccgctgcacgagtgggtgctgcgggagggcgaggagtga

SEQ ID NO: 4588 - RNA, 945 nt, synthetic construct
  misc_feature 1..945: note = P43356 variant
  source 1..945: mol_type = other RNA
atgcccctggagcagcggagccagcactgcaagccggaggagggcctcgaggcccgcggggaggccctgggcctggtgggggcgcaggcccccgccaccgaggagcagcagaccgcctccagctccagcacgctcgtcgaggtgaccctgggcgaggtgcccgccgcggactcccccagcccgccccactccccccagggggccagctccttcagcaccaccatcaactacacgctgtggcggcagtccgacgagggcagctccaaccaggaggaggagggcccccgcatgttcccggacctcgagagcgagttccaggccgccatctcccggaagatggtcgagctggtgcacttcctgctcctgaagtaccgcgcgcgggagcccgtgaccaaggccgagatgctggagagcgtcctccgcaactgccaggacttcttccccgtgatcttctccaaggccagcgagtacctgcagctggtgttcgggatcgaggtcgtggaggtggtccccatctcccacctctacatcctggtgacctgcctgggcctcagctacgacgggctgctgggcgacaaccaggtgatgccgaagaccgggctcctgatcatcgtcctggccatcatcgccatcgagggcgactgcgcgcccgaggagaagatctgggaggagctcagcatgctggaggtgttcgagggccgggaggactccgtgttcgcccacccccgcaagctgctcatgcaggacctggtccaggagaactacctggagtaccggcaggtgcccgggagcgacccggcctgctacgagttcctctggggcccccgcgccctgatcgagacgtcctacgtgaaggtcctgcaccacaccctcaagatcgggggcgagccccacatcagctacccgccgctgcacgagcgggccctgcgcgagggcgaggagtga

SEQ ID NO: 4589 - RNA, 2253 nt, synthetic construct
  misc_feature 1..2253: note = Q04609 variant
  source 1..2253: mol_type = other RNA
atgtggaacctgctccacgagaccgacagcgccgtggccaccgcgcggcgcccccggtggctgtgcgccggcgccctggtcctcgccgggggcttcttcctgctggggttcctcttcggctggttcatcaagtccagcaacgaggccacgaacatcaccccgaagcacaacatgaaggcgttcctggacgagctgaaggccgagaacatcaagaagttcctctacaacttcacccagatcccccacctggccgggaccgagcagaacttccagctggccaagcagatccagtcccagtggaaggagttcggcctcgacagcgtggagctggcgcactacgacgtgctgctctcctaccccaacaagacgcaccccaactacatcagcatcatcaacgaggacggcaacgagatcttcaacacctccctgttcgagccgcccccccccgggtacgagaacgtcagcgacatcgtgccgcccttctccgccttcagcccccagggcatgcccgagggggacctggtgtacgtcaactacgcccgcaccgaggacttcttcaagctcgagcgggacatgaagatcaactgctccggcaagatcgtgatcgcccgctacgggaaggtgttccggggcaacaaggtcaagaacgcccagctggcgggcgccaagggggtgatcctgtacagcgacccggccgactacttcgcccccggcgtgaagtcctaccccgacgggtggaacctccccggcggcggggtccagcgcggcaacatcctgaacctgaacggggccggcgacccgctcacccccgggtaccccgcgaacgagtacgcctaccggcgcggcatcgccgaggccgtgggcctgcccagcatcccggtgcaccccatcgggtactacgacgcccagaagctgctcgagaagatgggcgggtccgcgccccccgacagctcctggcggggcagcctgaaggtcccgtacaacgtggggcccggcttcacgggcaacttctccacccagaaggtgaagatgcacatccacagcaccaacgaggtcacccgcatctacaacgtgatcgggacgctgcggggcgccgtggagcccgaccgctacgtcatcctcgggggccaccgggacagctgggtgttcgggggcatcgacccccagtccggcgccgccgtggtccacgagatcgtgcgcagcttcgggaccctgaagaaggagggctggcggccgcgccggaccatcctgttcgcctcctgggacgcggaggagttcgggctcctgggcagcaccgagtgggccgaggagaactcccgcctgctccaggagcggggcgtcgcctacatcaacgccgacagctccatcgaggggaactacacgctgcgcgtggactgcaccccgctgatgtacagcctcgtgcacaacctgaccaaggagctgaagtcccccgacgagggcttcgaggggaagagcctctacgagtcctggaccaagaagagcccgtcccccgagttcagcggcatgccccggatctccaagctggggagcggcaacgacttcgaggtcttcttccagcggctgggcatcgcgtccgggcgcgcccggtacacgaagaactgggagaccaacaagttcagcggctaccccctctaccactccgtgtacgagacctacgagctggtggagaagttctacgacccgatgttcaagtaccacctgaccgtcgcccaggtgcgcgggggcatggtgttcgagctggccaacagcatcgtcctccccttcgactgccgggactacgccgtggtgctgcgcaagtacgcggacaagatctacagcatctccatgaagcacccccaggagatgaagacgtacagcgtctccttcgacagcctgttctccgccgtgaagaacttcaccgagatcgccagcaagttctccgagcggctccaggacttcgacaagagcaaccccatcgtgctgcgcatgatgaacgaccagctgatgttcctcgagcgggccttcatcgacccgctggggctgcccgaccgccccttctaccggcacgtcatctacgccccctccagccacaacaagtacgcgggcgagtccttcccggggatctacgacgccctcttcgacatcgagagcaaggtggacccctccaaggcctggggcgaggtgaagcgccagatctacgtcgccgccttcaccgtgcaggcggccgccgagaccctgagcgaggtggcctga

SEQ ID NO: 4590 - RNA, 786 nt, synthetic construct
  misc_feature 1..786: note = P07288-1 variant
  source 1..786: mol_type = other RNA
atgtgggtgcccgtcgtgttcctgaccctcagcgtgacctggatcggcgccgccccgctgatcctgtcccggatcgtcgggggctgggagtgcgagaagcacagccagccctggcaggtgctcgtggcgtcccgcgggcgggccgtctgcggcggggtgctggtgcacccccagtgggtcctgacggccgcccactgcatccgcaacaagagcgtgatcctcctgggccggcactccctgttccaccccgaggacaccggccaggtgttccaggtcagccactccttcccgcaccccctctacgacatgagcctgctgaagaaccgcttcctccggcccggggacgactccagccacgacctgatgctgctccgcctgtccgagcccgccgagctgaccgacgcggtgaaggtgatggacctcccgacccaggagcccgccctgggcacgacctgctacgccagcgggtggggctccatcgagcccgaggagttcctgacccccaagaagctccagtgcgtcgacctgcacgtgatcagcaacgacgtgtgcgcccaggtccacccgcagaaggtgaccaagttcatgctgtgcgcggggcggtggacgggcggcaagtccacctgcagcggggactccggcgggcccctcgtgtgcaacggcgtcctgcagggcatcaccagctgggggtccgagccctgcgccctgcccgagcgcccgagcctctacaccaaggtggtgcactaccggaagtggatcaaggacacgatcgtcgccaacccctga

SEQ ID NO: 4591 - RNA, 646 nt, synthetic construct
  misc_feature 1..646: note = P40967 variant
  source 1..646: mol_type = other RNA
atgggggcgctgcctacggaggtggcagccatctccttctcggcatcaagcttaccatgaaggtgccccggaaccaggactggctcggcgggggcgggagcggcgggggcggctccgggggcgggggcagctccgtgtacgacttcttcgtgtggctgggcgggggcgggagcggcgggggcggctccgggggcgggggcagcacggcccccgacaacctgggctacatgggcgggggcgggagcggcgggggcggctccgggggcgggggcagcgccaagttcgtggccgcctggaccctgaaggcggccgcctgaggactagtgcatcacatttaaaagcatctcagcctaccatgagaataagagaaagaaaatgaagatcaatagcttattcatctctttttctttttcgttggtgtaaagccaacaccctgtctaaaaaacataaatttctttaatcattttgcctcttttctctgtgcttcaattaataaaaaatggaaagaacctagatctaaaaaaaaaaaaaaaaaaaaaaaaaaaaaaaaaaaaaaaaaaaaaaaaaaaaaaaaaaaaaaaatgcatcccccccccccccccccccccccccccccccaaaggctcttttcagagccaccagaatt

SEQ ID NO: 4592 - protein, 7 aa, synthetic construct
  REGION 1..7: note = Synthetic peptide
RRRRRRR

SEQ ID NO: 4593 - protein, 8 aa, synthetic construct
  REGION 1..8: note = Synthetic peptide
RRRRRRRR

SEQ ID NO: 4594 - protein, 9 aa, synthetic construct
  REGION 1..9: note = Synthetic peptide
RRRRRRRRR

SEQ ID NO: 4595 - protein, 12 aa, synthetic construct
  REGION 1..12: note = Synthetic peptide
HHHRRRRRRRRR

SEQ ID NO: 4596 - protein, 12 aa, synthetic construct
  REGION 1..12: note = Synthetic peptide
RRRRRRRRRHHH

SEQ ID NO: 4597 - protein, 15 aa, synthetic construct
  REGION 1..15: note = Synthetic peptide
HHHRRRRRRRRRHHH

SEQ ID NO: 4598 - protein, 15 aa, synthetic construct
  REGION 1..15: note = Synthetic peptide
YSSRRRRRRRRRSSY

SEQ ID NO: 4599 - protein, 12 aa, synthetic construct
  REGION 1..12: note = Synthetic peptide
RKHRKHRKHRKH

SEQ ID NO: 4600 - protein, 8 aa, synthetic construct
  REGION 1..8: note = Synthetic peptide
YRKHRKHR

SEQ ID NO: 4601-4602 - skipped (2 entries)
